United States Patent Application Publication US 2019/0183130 A1 - sequence listing, part 8

SEQ ID NO: 1 - DNA, 19352526 bp, Cryptococcus macerans (residues 13,546,772-15,482,024 of 19,352,526)
gctcgcgctccttgggcgtcgccagtgcgtgcgattcggcgccgtaagggagcgagccccgggcgaaggggccgacggcccagaagaggatgttgcgatggagctcgggcggcaggtagggcgccggcgatgagtctgcttgcgagagcatggcgtcctgtgtgggtggtagggtgcagcaagcgagagagagcaatatggcgatggctgacgaggcgacgacggccgatcgggttctcgggccgacgtcaacgaggctgggcaagaccgggctgcgcagcaaaccacagtcagaggccgtcgcttccctcgaccctagtagccagcaacgagctcgactagcttcggtcagtgcttcgaggcagctaccgctcagcagactgcatgctggctcgagcggatgatggccagactgcccctgtgttgctacgagatgccgcgtggccgtctgccttcgccgtgtcgctcctgtcgctaggcctcctgtcctccctccgagcctccgaagctgcccctctcactttgggaggtcgccgaactcttcctccctttcgaccaccatgaacaacacgacggaacccgcagctcgcacgagtccgcactcagctctccagccctcgtttggcgaagcgcttccatcttaccggaccctccccgaccagccgcccagcttctcgaccgctccttcagcgagcagcccctcgagctcccaccaacctccaagcgccgagccagtctctcagctacgaggcgtgaagcctgactacaccgcgcaagccgaggacacgcagccctcggtcaagctctcatccgccagtgtcgggccaccctcgtcgaccgtcttgaaggccggctctcagccctcttttagcctgctctcggccgacctcgagccgagcggcaacaaagaaaatgaacgtctagaagaagcggctgcctgccggcccactccatcgtccatttcgcttcagaggctaccggtcagtcatccaggcggctcaatctggttcacccacggctcgacggtccgaacggccagagccgggagcgagcgcttcttcacggctcgagaggggccggcaaagatcgacgaggaggggacgccgccgctgagacgcttctttgaggaagacacacaggtgtgctcttgtctgctgctgcttcaccctcttgtgcaaaggctgacatctgtgtcgatgcaggccgcccccgtcaattcagcagacacgccaccgccgtctttgctccagtcggtgctcgtcggactctcagcggcgaccatcctgcccgagcagcccctcgagggcgcacgatttacggccagctggtgcgctgacgtctgggctggcggcgctcgcctctggggtgcaggagaggatgacgccggccgctgaggacgcgaccgctcgcagaggccagcttgcgcctgatgcatgctggtctgccgcagctgaggccggcttgaagagaagtgacatgatggagaagacgtgaaaagcagctcgcccgaacgacccccgcgcggctcgcccgctagattagcccatcctttgtccagtcctcccagtcgtgcgccgcgagcgcctgtgtcgtctggctcgactcgggtgagcggacgctgaatggtggcgaggccgtcagctggctcgtgaccggcagggtgccgacgcgagaacaagaacgcacgcgccgctcgcgatctttgttgcctggcggtcgactgctcttgaatcgagcttagcgctggcacgcgagatgagaggctgtcagcaagtcagtccagagggagccaaagagacacagagaccgacacgtaggcggcgtgaccgagcgggccgccatggctacggtaagcgagggcctggatagcggccagtcggtagcctgagaagcagcgataagcagttcaggatgacggacgaccttgcgctcagatctcgagactgacggatgacgttgggtggcatataccgctcgggctagacaagcaaaggcggcgtcagtgagcaatttgcagcaagcaagagccatactcgaccgacagggaatgacttgagcgccagcagctcccgatccgagacgcgaaaaacggcctgcgcgacagaagagcggaagccagtcagagtcgagcgtcatagggacaagtgaggaagaggaggctgctcaccttggcatgcgtcttgcggatcatcggcgtgttgaccgccgtcgaaacgacggcccgcaaggccgaccgccacgggtcggctgcgcgctcgcgccagtggaaccaagcttggatgacctcggcgcgctgccagcctggcatcatgttcaagtgcctaggcggatccgagggtagtgagctggtagtcaagggcgggcgggtctgcattggacgcacttttgcgcctcctcgggcgtcatgtcgacctcgaagaccatctggctgtccatcaggagcggctcgagggtccacgacgacgtcggctcgagcgaaatgtccttgcgcatgagctcgcgccgcaggtcttgctgcattgcctcgcgcttggcttcctttagctggcgctcttcggtcgtcgagccccatgcgtcccagaggtcgccgtgccccgtcgcaccggcggacgaaatgatgtgccgcgcagcgttccacgagtggccggcaacctggtagatcggcggatcgacccgagcgggcatgatgtagctccccgctgagcctggaggtcggcttgggagatgatccgactcgatgaggatctcctgcgtcgtgtactgcagcccgcgctggaggacggtcgtctcccgaaaggcttcgaagaggacctggcggcaggaaggactaagatcagtcaaagctgtcgcgagtatcttcatctgttgggctgcttacctcgaagacgacgtccgtgtagcacctgagcaaagcacaagcgagggtgtcagcggcagcgtcctcgctcggccggcgcgcacgcgcaacgagcacaactcaccgccggagaaagcggcaggtgccggccagcgctaggtgatcgcgcaggtcgaggtccgtgtcgatcgagatgatcctgtcagagcgggacacgaacgctagtcagaggcgagtgagtggttttgaagagttcctgacgcacaagtcgagcagctcggccggcagcgccgcgaaaagtttacccttccagagctcggccggctgtaggtcgtgccagtgcgcgacctttggcgtcttctttgtgtctaggcgggctggagttttgtcgtgagccagctcgagagctgcagcgaggccagtcggacgagggtcggccgctgcgcatgcgacgcgtcgagcacctgaagctgatctctgcgagagaccttcgactgaagcgccttcaacaggctgcgacaagccggcagcagagcttgcatcgggctcgacactggggctctgcgagctgagcgtgagcttgagccgacgagggagaggtgatggcttggctccggtcgacggcgcgtctcctgctggtccgaaggacgagctgcctaaggcgacgagatcgacaacgtcagtcatcgagcccgccgtcacggggcatggcagacggcgctgaccttggatctgagacgcgtgcgacctcagccggcgaccgctatgctcgccgtccttggctgttctggcgttgggtcgcgcacgcttgccgtcgggcgcaaccggcgggagcggcacttgggcggagagagcggtcgtcgagctggagggcagctggtcgaccgaagaggagacgcccaagcggctgctcgagcttctgagcgaccggccgccagcgttcgacatgtggctggccgggagggaggttgtagtcaggaggacgggcgacccaagccaagtcgaggtcaagacgtcttcgacgcgtcggcacctctgaccgtcacctcatccagccgtctgaccgccctacgacgccattgaccgccttacctgacctttgatggaatagctgggtgctttgacccgcgtatgctgaccagctgacaactggcctgatcgactgccctgccggacgaccgctgccgccagccggggcaaggcctgacctaccccgcgcctgcgtccgaccgctagtcatctgctcgagaacctcgagattcccaggtcgctttgctcttccaacggactcgctttggttgtacgtgaaagctctgtgcgctgctgcctgatcgccactcttgccctcgagcgggcagtgatccaacgtcgtaagctcgcacagcagagacgtcaagctgcgtcggtcggcccagacgtcgctgtcacgctcgtcctcctcgaatgcaggccgagcgacgtcatcggctctctgcaactcaagcgctgcacctgatgcccctccgactttgtcacggagcttgagcgacgcccttcgcccctcgctttcgtccgaccgtagcgctcgacctcttttgcaatcggccggtcgctctcgagccctgtcctctcagccgtgccagctgactgacgttcagtctctctcagactcggctgtttgcactgccgactgccgacgccttgccctcgcaagccatgagtcgtatcacctctgccggagacgccactgctcgtcatcctcggcgacttctcgtcacgccccggaccaagcctgcgggccaaggctcgtctactatccccgcaggagacaggagcgcctctgcggcgcgatcgcggagtgtgacgagaaggaggcgtcgccttcacgtcgaggcccgggcgtcgtcgactcggccggagcaaccgacgtcggccgcatcttgactacgagcgccttgattcaccgactcggcttcagagtgcgcatcttgacgcccttcacgtgcacatccttttcctcgccagtacatagagctgaagagagaccctgctggccgagctgcgcgaaggaggcggcggccggaccctacccgcttgccccttgaaacggcccttcagtcggccgctcgactttctcctgacccaccgccacgctaccgctcgctcctctttccctactcttcttgcttggctgctgaccacatcgcccttcacatgacatcgacgccgacgacgacttcttttccctctgaccatcacccccgcaggcccagccagcagtcgccctcgcttgaccgcggccgcccctctcctctctctcgccagcagactcccatcacgggctcgagcgtcatcgaccagccagctcttcacacgcccctcgtcgtcggccgaactcgccgatccctgccgcccgctaccttttggccgtcgacagcagccgacgcccaccgacccaaagtcaccttccctcgcgctgctcgtcctcgtcttctcgtcgcccaacacgccttctctcctcgctctagtcgactcgctcgccgacctgctcgctccgcccgccgctcgaaactctcgtccggctgttcggtgagctccttccgcactctatcgggttaagcccacgcgttcggccggagcgagggcggccggtacctggcagaggacaagctactttttgcccgtcccggtcgtcggcttcctcctcttcttcctacgttgtcgagctgactgtcctctcttgccgtcttgcagctgccgccgccttcgacgcaagcttgcctcgtcgctcctccgacgttccactcgtctgttcgttcttggcccggtcggatcgaccgctgtactgactgatgccgacctcctttctccgcagggaacgtcttgcccgccagcacgaccgaccgccggccgacctcggctctgctcatccggttagcgcttctccgccctcctccgctctgccctcgatcagaactgacgacgcctgaccgctgccagccctctgcaggtcagtcgctcctcagccttctcgcgtcagcagcatccagcagtcggtgagcggcttgaccgtcagagagcaacgacctgacgtgcccttccatgctcgacagtcctccgaccgactcgcacctcgaccgctccgcccgcgcacgccggaccgcttgcctcgccgttccacgctcgtccgctcggccagcacgacatcctgtgagtaatccgattcgtctccctgctcttcatcgtcagccgccgggcggaaggaaagacgggcttgccgggcactgtaggggacccgaccggaccatcgtctgctcccgggcgcggtgaccgagttgttgacatgggagggctctggctgagcacttagcgatgccggagggtccatggctgggcgctcgtctcatcgcgcgttcgtccaggcgcatgtctgtgcggccgtcggtagcctggtggatgaggagaggtcggcgacgtggcctgtcgggagccgcggcagacgagtctatgctgcgcaggtcggcggccgtcagtttggacgaccaaggtcgggacgagaagccgatggcccgctgggtttatgcgtgacaagcagagtggcggcctgttcacggtgatggcgccgtcacagtttggcctcgctgccgaggatcgtcagcagcgatgagggaggtggggagcgcccgccagcagagagcaacggtgaaggcgaggcccgccagggtcgtttggcgtgtgaaggtgtggggcagcgaagggggagcggcggcagaagcgctgaccttcaccatcccgcgctgcgcttctcgtcccctgtccctctccgctcggcagcgattgccaaagcaggtctcagcaggaggtaagcggcgtcgccacgctctttgacctcgcacgaggcccacgatcgcgcccggtcgagtggatcacgtcacgtcgccgggcgttctcctctgctgcatgcagtcggtcgtcagcaggaggcgcgccctgggacgacggagagaagacgggcacgcattgcttggtctctgcagctggctgtttgcagaactagaatgagagacctgtcgtcttgcacctcttcggctgacctgcaagctttgccttttcacctccctggctcgactttttaggctcgctctctcatcaagcccagccgtaactctgactgctgcgaccgcccgcgccggcgcctgtagaagccccatcccgcccgctggtgagtgcagtttttttccctcgatctcgcgcgtacctctgcccttgttcctccctgttctcgacggggttgattgaaggacgacgggagtaacgccattaggccatgccgcgggtgttgcgcccagcgaccgggcccgccggttaccgtgaaggccgggcggtggaaccttgcgggcggggcggcggagggaggcgagggagcgcggcacgggcgggccgtgactttggacgccaccatcccagcccgttgcgctcggcgcgtcttcgtggtcgcgcgagttgatttttctttctcgccggccggcctcgcccctcgctcgccgcacgcacaggcagaggccgtgggcgtgggcgtgaaggggaaagaggggacgggccgccgcccgcgcgtccgcgcagcagtcgcagcagcggggctgaaggcccagcgggggatctcctcgtcgtcccggccgagcttgcctttgacatcgtgaaggagagacgactcgatctgccgctcgcatcaccgcacctccctcctctctcctaccggagcgctccttctcccccgccggcccctcttcctctctgtttccagcgctacgccagccatcgaatcgcccgaccgctgagaaaacctcctcgctggtttcccttcgttcctcggccgccgctccctctccagcacctgtcgcccgtcttccgccgcctccgtccctccttcctctcgcttctccagcctacctccagattctggcaagaccctccatcgctaccgctccggcctctagcccttctcgcgctctcgcggcctctcgctcggctcgacccgtgcctttctccgcgcgcgtcgaattaggctcgccttccgactgtcaatcggtgcctggaccccgccccctcgtaacgctcctttgccggccctcgccagttcacctcgcctcctccttgcggacgcgcctgcccgcctcctagagctcgaccctcaccctcctccagctctacgcgcgacatcttcccggcgacgcctccctccccctccttccgccgaactgctctaggcaacctctcactccccccaaacaatgccgtcctctcgctcaacgacctcctcgacgagcgccagcgctacctccagcatgccagccggctcggcgagccgacaccaggcctactcgaacccgtcccgcaagcgggcgtcggttgtcctctcggaagactacgccgccgccggcccgtcgacgacctactcttcatcagcctcggccgcctcgcacggctgctgccagacggccgcctcctcggtcgcctcgtcgtcccggccacaacatccgacaacccaagccggtcgccggagctcgcccgcgcgtgcgctcaagaagtcgacctcggtccggaaggcaaaggcggtcgtcgccgccgtcgtcgtccagacggctgccatcggctcggtcggcgctgccgacccgtccgagtaccgcatgctgttcgaggacgagtaccgcgacgaggcgacggtgtacatgcacgtcatggaggtgcgtcctgccggtcgactttctgccggtcgagctcgatggccctcgatggcctcgatgactatccggtggctgaccccttgtgctctgtcggctctttttcgctcgcctttgcagaagtcgacccagccacaggtcgacctgatggacatgcagcccgagctgcagtggtacatgcggcccttcctcaccgagtttctcatcgagatccaccagcagttccggctcaggcccgaggtcctctacctcgcgatgaatatcgtcgaccgctacgtctcgaaacgcgtcgtcttcaagaagcactaccagctcgtcggctgcgccgccctctggatcgccgccaagtttgaggtgcgtcgcactcgaaagatgagagacggaagatggtggctgaccgcgcctgcctgccatgcatccctcattcctcctccaggactccaaggacaaggtgccgacggtcgagatgctgcgcgacatgtgctgcaacgcctacgacgagtcggccttcattcagatggagggccacgtcctgtcgaccatcaactggtgcctcggtcacccgacggccgagtcgtggctccggctcgcgtgcatgggcacctcggtcgaagacgccgagacgcagcacgtcgcgcgcttcgtcatggagctctcgcttttccacaaggagtttgtcggcttcctgccgtcggcggtcgcggccggcgctcttatgctcgcccgcttcctcctgcgcaagtcgcggcgcgaagtcgacgagcaggacgcctcggtcgaagtcgccttcctgctcgacttgcatctcggcgagcgcctcgagcacgtgtccgagattgtcgtcggcaagtactcgcacagctactacaaccgatcctcggcctttgttcgcgagcagtacctcaagggccgccggttcgagatccggctcccggttgtcgccccgctgctctcgcccgccctctcggccatctcgtcctcgtcgagcgtgccgtcgctcgtcgacgacacctggtcgcgctcctcgtcgtcgagctcgatcgtctccgacttttcgccccgccggtcgagctcagcctcctcgttcgagtcggacatgcccgagacgccgacctacgcgccctttgttgacgcggctgagccgtttgtcgtcctgcccgactcgcagccgctgccgtcggcggccgtcatgtcgctcgccgtccccgtcgttagcaaagactttcggtcgcgtgagaagacggccgtcccgaccatccggaccggctacgtcgtccaggagccccggaccgtcttccagagccttcagcagcaggccagcggcgtctaccagtcgaccctaccgatcgccgtccgccgcttcagcggctaggctcccgcacctacacacacacatacttgcatcgtcccggaacggacctcactttaacccttttctcgctctcacactgcccgccgcatctacacaaccccttttgcattgccccttccttccttctctcgccctgttttccaccttcctgctctcgagactttgttctgctcggcggccccgtcttccgccataccccagcatccgcccgccacctcgctcgtttcagcaggaggcatacccccgctcgctcgctctccatcacgacctcacagccatctgcgcttcttacccttgactcccttggaatccaacgcctttcgatctggtcactggcatcgagcatcaggcagcgacaccgaccacgctctcgaccgcaccgagcacgccgttgcgagcggtcctcgccgagctgaacctcggccctcgcagctcgacctctaaggcgcgcacgaaaggttcgatacgctcccggccgtcgaccgcaacggccagcctgaggacgcgcctgacgacgtcctcgaggagggataggcgactgtctggcaagttggcctgggcttgagggagaaactgaacgaggaataactcgagcaggcgcccctcgggcgctgagagcgcaaggatggcagcaaagcggtcgagagcgccagccgagggcgaggccgggatggtgagggcgttccagagcgatgacaagacggccgacgagccggcgaacttgagcaggcgcggcaagctcgaggtcgggatcgcagaggcgagatggactgccaaaggtggcgaaacgtaatattcggcaaagacgtcgaccgcttgcggccacgtctgccctgagcaaggcgtcgctttgtcgattaggcgagaagaggggttgtggtcagcgtgggtcacaataagcgagttgtaagggcgcctggcgcacctggcgttgtcgacagaagccgccggatcgcttccacgtcgatggcgccgcccggcatcgatttggtcgctggctcggccaatagatcaaggatggctctgccgtgcagttcgaggacggcaggcgggcagcccgtctcaagcaggaggccctccagcacgcgcagatgggcgccgcctcgcgagctgtcaccgggtgagcaggttgcgtggatcagcggctgcccaagcgttggacaattgaaggcaagagtgactcacctgacccgctgaatctcttgcacgagccagggaacgatgcccgtcagctgccaggcgaggaagggctggctgaagtagctcaggccggccttaagcgtgtcgaggtcgatcatcttgcgctggtaggcggcgagggcctgtgagacgagcgtcgtcgccagcttgaagagcatgcgcggcgctgtcgacctgggcgcataggtaagacgcgtcagtgaaagacgaatagagcgccgacaggcgaaaagcgggcgcactgcagcaagtcgtctgcgatgccctctgagccgaacagcgcggtcacccagccgccaaggaggtccttctcgtcctcattaagcgcgccgatcggctgcaccatcgccgcctggccgaagaaggccgccgagattgatcggtcatcgacgacgccaagcctctcgcgctcaagcttgatgggagggaaccggccggacaagtcagcggacgctgtgtctagaatcgttgacagagacgtacggaatgtcggcgaatgagcagctggatgcaggccgatatctgggcgtactgcaggagcgtcgactggctgtcgccatagccgtcgtcatcgaatgactcgagaaagtggatgccgtcgcgagccagcgctctgatggcttcataaccagttgcggcccaatcaagaagggcgtggaggagacctttggtctcgcgggcgagcagcgtctcgcaaatggaggcgagcaggccgatgtccttctcggcacacgccactcgccaggtctgcggccggtcaatcatggcctcgtcagcgatcgggcgtaccgagacggctgcgaatcgagcgagacgcacctcaaagaaggtctcggccagagcactctgcgaggcaaagtcaagggagagcactcggtccactgcgagcgcgttctggcggtctcgtgcagaggttgccggaccgcagatgtgcgaccagtacgactggagagaagggggagcgagtcagtgacgacagatctgccgaacagcagccaaatcgactcacctgcaagaggtcatagccaagcatgtcgccctctgcgagtgcgctagcccggacgctttcgccatcgggcaggccaagatccgtcgcgacctcttggtgcagaagaccggcttcggtcagagcctggagcagatcgagccgcacgggcggaagagtcgacctggatgtgatcaggacgagtcgggttagcaaaggacgagacgagcgcagccgccggttgtgaccgcgcgcaccttgtttcgacgccctcgtcgtgatgctcctcgtgcatgccgtctccttcctcttcaacgccctccatacgactcgcgcgcctccctggcggacgctgactagccgcgtgctggtcgatgcgctcgagtgcggccaccacgtctcgactatcgagcagcgagcttacgagagcggcggggtctgccagctgaagggcggcgaggtgaccaggcagctgaaggcagaagcgggagtcaactcggctcgaggtctcctcctgaggatgataacgcacctggccgatcacaaatgatcgcgttgcacgagagcgctgagccaagccgagaaggccaacctcgatcagctcgcgcgcaagcccatcacgcccgccggaaaataacagctccagctggccagcgaccgcctgaagaagcttctgccgttcgccagtcgcgcgtgagacctgcagcgaggtccaagctcgagggtcagcgagaggtcacgcagagaagcgtcggtcgtggcgacgcaccagcgcttccaacacgatctcggctaggcgtctcgacccttgaccttgctcgacgccgggctcgctgccggctgcgacagacgggtccttcatcatgctctggacgtcggtctcgagcgctccgataacgcgctcctccagcccgcccttgatggccgtcgagggaccggtcgagatcacggggtgcagcccgacgccgccgccaccggcagtcacctgagtgatggctcgctccagcgcaaccttgaggtcgactgtgtgcgagttaagccgagggatggccgagagggtcgcgagcagcgcggcggcctgccccgcggtcgagaccggaaggccagaggtgctgagcagccgagcggccaaattgaccagcgatggtgagcgggtctcggccgaagcgagaagttcaagcagtcgacttgctgttgtagtgaggctgaggagggccgagtaaggcagaagcagggcccagagcgaggctggtgcggatgaggccgaggttggcgcaagcgctgagacgaagagcgcttgcgggccgacgagcggcggggtcgacgaaagggcggcggacagcagcgactggtggtaggtcgtcgaaggcggtacgagggccgctgcaaaggcgagcgggaggtcagcgctggctcgtaggtcattgcagctcgagacgtgatgcactcaagacggcctgctcgagctcggctaagccgagcgtctcgttctgagcgagttggtagattaagccggcccactaaatcagtcgaaaggtagcgcacaattagctgctgcagctcgaggggcgtctttcgcaggacgcacctgggcagccggcagcgagtgcgaccaggcgagatgggtcaccgagcggacggagggcggcggggcgggcgaagccgccgaggtcgacatggcctgggagttgggcgaggccagcgtgtggcgggcgaaggcgggagatcagacgctgctgcttccttggcgagggaggatcccaaggtcgagcggcgagaaggctggctgagcgtcgaaggcgaatgtcgacgtcgcgagggacagacaagacggcgggctggaggagacgtcccgccgagcggcgcagcacgctcctgcacgacgcctcccccggtctgcttcgcgtccagtaaccgcctcgacacgcggaggcacggatcatcaatggcggcaaggaaagagggcggtgggctacagcaaggggcgagacagaggggtgagatgcgaggagtaggctactgcttgccgtacatgttgagctgaaggagagccgccgccgatcgagtcggtcgcgtccgccgagacgttctgcgtcaccttaaacaggttcttttcctcggcggcacgctttgcacggacccaggcgccaagctgttcagcagcccaggcaacgcccgccgcccgctgcgcatgggacttgttgactttgttgcgcacatttctgaagcattgcaagaggcatgagaacaagagtcagcatcgcatctcacacagaaggcaaaaactctcactcacgttctcgtaccgagcttccgcctgtttggcggtgcgccgttgatcgtcggtcgcgaggtcggggttgtgccgggtctcctcgccccactgagcgtggtggttcatacaaacgtactctttgaactggttggccgcctcagtgaattgcggctggaccttggtctgcatttgcgggagctcgagttgatctgcaggacgagggcgcttttcagtaagccccaggagaggatcgctagacaaagcgggcgtaggacggacagaggtcaggtttcttgcacatcacctggtcgataaacgtcttgcggtcctggtcgtcgaattcctcgatgccgacgatcttgtccaactcggccgccttgatcatcgtgcggatacaggcgggagcggtgacgtctgcgtcagccggcacaaagatgtcagcgaggaggaaaggagagattgagagcgacaaggagacaccgtcgaggttgcgcagagcgcaaaaagtgaacgtcaccttccacgtcttgaacgcagggtccgcgcgtgagtcgatctcgaagaggacgaccaggtcttcctcgcttgcggttcaggcgttgaggatgcatcagaagcgagattacagacgaagcgtttgtcgaggatttacagagcttgcgggccgcgtagctgttatcgacgacggagcacaggaggcgcagctcatcgaattgatcgtacatgtcctcggtgatgcggacgacggcgaggcagacagcctgtttggtcaggagaaggcgtcggtcagctgtccgatcagacgacaggcggcgctgcaggagaccaacctggcccgacaagatgctcagaggggcgattgctgggacatccatggcggggaggcgccagacagtcgaagataggatggaaggtgttggcgtgtggtgctggggaaggggaagcgtcggggcggcagcgaaaagcgtcgggggctgcaggcagacgggaggcagaaggggaggagagggtgacggtcagagggcgaaggggagcggcgcatttgggacgaccaagccgagaagcagacgagacaaagaaaggccggcgagctgcggtcagcagccaggaaaggcaggtgggtttcgagtagggaggtgaaggcagcccgtctgggcctgcccatgcttcgttcgcccctttcatttcgcgcagcaggtttgcgccatcggctcgcgtccagcgaaggcctcaaccgcagcttagacgagctcgcaatggatgctccttgaatgtgcggcaacacaggcccgaggaaagacgtctggcagagacgggcatggccgttcatggcacggagtgaccgctcgtgcgtcctcgatcgggctcagaggggcggcaagtgttgtgatagcctagatggggtttatattcccgaccgggctcgtatcctcgaccgaagaagcccgtttggatttaaaagagctgctgcgctcccgcccgacttcgcgggcggcgagcttgagcaggtgaaaagatctcagtcactcgtctggagctaaattggtcctcctgccaggtgcgcttggtctctccgtacctatcgatgtgatgcaatcatctggagctgctgggttccttgtgctaggtctgctgccttcggtcgagcgattctcaacacgcgcgggcggactcggccggcgggtggcgtttcacagtcaccgctcaagagtttcggccgtcgtccggctcctcccaagggtataagaagaggccgctcaaacggaaagagggggaagaaaattaaaaagcatcgaatcccctaccactcgtgtcaaagggcaccaaccctttactcacgcgccacgggataacgtagacactgcccagctaggaagctacctcgacgtcaccttgctctgcctacgggcttgcttggaggagagagtagtgtcgaaatttttgggcaacatttccctaccttcctcgtcttttatgctctgctcgtcgcttcctcattgaggacggcagcaggcgagagtcgagcgtctcgcagcgggagccaagtgggtgcaggcgtcgtactcgttcaacgacggaggacacttgcgcgcgggcgggacgatcttcggccccgtgtagcacctaaggaacacctgcactccgctcaacgtttacaatggccttttcactgcccgctcggcagcttgtctttgtctgcctgattctttgcgaaggagccgcacctaaggaacacctgcactccgctcaacgtttacaatggccttttcactgcccgctcggcagcttgtctttgtctgcctgattctttgcgaaggagccgtggctcagcttctcgtcgaatgcgtcggtcgtcagccgaaagtcgactttcgcgctcgctcgcctccgacgtcgaccgagctcccgccaagtccaccctatcgtttccctcgctcgtccggcaggcttcccgcgcaggaccatgggctactacgacgaggtcgagattgaggatttcgtttgggacccggtcgcccggacgttccactacccgtgcccttgcggcggtgcgtccctcgctgctgcttcgggtcgcccgaacctggttggcctgccgaccgaccctacctgcccacctgcctcaccccttcgtcgccagaccgcttcgagatcacaaagctcatgctccgggacggcgaggacattgcaacttgcccgtcgtgctcgctcatcgtccgggtaatctacgacccagtacgtctcgtcccagggaactcggctgcagccgccggccgtccctccacctttgccgcagctgaccctcaccgccgaccgatatcaacagctcgactgggaggactactcggactcggaggaagaggacgacggcgagggctccgaagccgagagcgacggcgagtcggccagcagctcggtctcgttccactcggccaaggaggtggaggccggcgccgaggtcgtcaaggcgctcgagggactcgagctcaaggcttagagccttcgttcagcgttttaggtcttcttaggtcggccgcttacgagggccggtcactcgaaccattctcaactgcgtacgtcgtgcttcaagccaggccgcgttgcgccgctcgagggcatccgctgacgctgcgctcgcgtcctcaggcatgtcttcacgccatcctcgaacaatagcccacgccggttgaacaggcccaggacaacgttggttcgcaggcagagacactgtccgccacacgcgacaccatcctgaggcatgcaccctcctcatggcagcagcagggtgcgtccacgagcaacgccttatggagtgccgagcaaggctgacctaagacgtaccgctcttcgtctagccttgagtcatgcctcggaagtcattcacgacggcgtccaatcggactcgttgcgcgacggccgtgaggctgctggtcgaggttgccctcgtctgtcggcgccgtattcacaagccaggcggccccttgcgcactcgactccggcttctatgccatgcgttttcgaccaacctcgcctacagaagcgtccatcggatcgtgcgagcgagacgagaggaaagtgacaggggcgagggtgtcgcgtgatagaccgagattgagaaggagggacaattagaccagaactaacgagtgagcgactgaattacgtttgatgggagaagagggccgattgagaggagaagggtctgcgcacgaggtgcgcctttgcgagtgcttcaggggagcgtcaggagcgatcaggccgtcggcgagtagagcggtggcatctcgacaaagctagcggcgtcgtcgccccgggtgttgcttggtccagcggcctggccggcgaacggtccctggcccgccggcgtcggctcggccgggagagagttgcggccgctcttgccggcctgcgaggcgtcctggacctgcgacgaggagccagggacgacaaatccagtcatggcgttctcgggggcgccctggtggatcgaggtccgctggccgaattgcgtgtcgacgggcgatgtcggctgctgctgctgctgctgctgctgctgcagttgctgcggctgctggtactgctgggcggcagggtacgcgccgtcggctccggagctgtactgctcgacgggcgagaaggcgccagagtcatgctgaggctgcgacgagccggtcgcgaccgagccggcatacgtgtcgtagcctgccgccgaggatgatccgcccgcgccgcccgaggcctgcgagtgcgcgtcgttggccgcgtacgaggccatcagctgggccttctcgttccgggcgctggcggcagagttaacggcgccgtaggctccaacactggcggcggccgcaccgactccggccgcgccgtagggagcgctggcttgcgagatgctataaagggactgcggagggggcgaggtggcgccgtagttgacggtcggctgcgggcaggggaattgggtcagccgccgagaaggccaagcgatgcatcgtgagaaggacgtacgacatagggctcgacgtggttggcgacgtcatccttgtcctcgaggaggggcgcgccggtcacgacgcccgacgcactgcgaaagggcggaaggactgtcagcgccaggcagccgacatcagcggcccttgaggcgaaacgcaccggtaagtgttggccataattggacccgagccgccaccgccggcgccgaccatgtcgtcctctgcccagtagtttccgccgctgccgccggcatgctcgcgccgggccttgcgcttccgccaccagaggaagccgccaatgacgaggagggcgaggatgccgccgacgacaccgccagcgatcgcgccgacgggcgccgaagagccgctgctggaggcgttggcgttgttgatgccggcgttggcgatgatggtcgcgttgacggcgtaagacgaggtcgactgttgagcacggcgacaacccagtcgtcagcaacagcggatgcgagagagagagcagcagcacgccaacgcaccgtccggacgagcgtcgagccgttggcggtgactgtgacctggatggccgagagcgcgatagaggtcgagacgctcgtgtacgagctctgcggggccgtcgtccttggtgcgctcgagggcgtcggcgtcgtgccgggctggacgacgacctgcgagccggggccgccgctggacgtcggccggacgggcgtgttcgacgacgtcggcgggtcctggcggttggggggatcagtcgaggtgatcggcgggtcggggcggctgcgagtcgaaatggcggattagcgagggtgacatctcgacgcagggcaaaggacatgagcggcctcacttgggaggcgaggggcccgggccggtgcaggatgccgagagaaccgtctcggtcgggatgacagacgtaaagggcacggtccgagtcgtcgtgacgagctgatattcgaccgagcttccgaagtcctgagcgcgaaggccgaaagaggggggagacgcgtgtaggtcagtagatggctgcttctcccgacgccttttagagcgactaaccgggtaggcggtccggagctgagtgacccagttgctgcagggcatgtcggtcctctgttccggcatgggcgtgagcgggcagtagtctggcccgccgctgcctttgcagccttcgcagcgctggggagggccgggacgtttgatggtcagtaggcgagcgcgacgtccagaatgaagggaggctcgcacgtattcggtcacgacgatcggcgaaggctcatagatgacggtctgcagagcggggaagaggcgggcgagtgaccgtcagcttctctcgtccacgcggttggttcggaggcggccctgaccctcgtaaagacctcggtctcctcgcgcgaggagattgaagtcgtgaagcgagtctcgaccggtatgttaacgcagacggacatgctgggcgaggacgtcgacgagcgagcagtgggcgggcaagcgcggttggcgccgtgttggggcgggcgggtaggcggctggtgctcgggcgagctgtcgtggcgagcggcagggcgagtgtgggctgtactgtgtcagagaggaaagtttcgagatggaagaatgaggtgagagtccggagagagggaggagcggaaagaagccctccccttgcccgcctgctgcttcctcctcctcctcgcccgcccgctcgcagctgcttgcagccgttcatcgcctctgcttggcctctgaccgcctcctcgggccgggccgaggtcaggaagctttcatggagaaggaccgcctcgctcggttgaggtcgggtcgagaccccgcgggaggtcgatccacggcactgggacgaccgttgattgagggctcgacgtttgccggcgccggcgccaagtccggcgcatcacgaaaagggaaaaaggaggcgttcctggtttcctcgaaagcgggctgggcgagcgaagaagagggtgagcagcggggtcaggagaaccggcgaggtcagcggcagcgacggcagcagcagcagcagcagcagtcatctcccctgcggtcaggctcttggcctgacgctcttgcgagggctcgccccccgcccggccgaggtggcgagcaaggcacctcccgagcagcagtggcgttttctcttcacgagagtttgttggtctcgggcgccctcgctcggcctcgtcggggatcggatcgaggagggagggcctcgatgcttgtctcgaccggaagcagcgataggcaaaccacgggagggtaggagccgcggctgcgtccttcttaggcagggcaaggcagtgtcgagcgacgaggttgaggtgagcaaggcgggttgcgagcaggcaagtcaggcagggtgcagggcggccaggggaacgatgtcgaggtcgggcaggcacgagctggcgtcgctcggaggcgcaaacgaatcggccgccggccgccgcgcagcacttcttgacctactgcccttcctctcttagcccccctctcgctcgcttgctcgtctattgaaaggtgtcattttttcttcaagtagccaggccgggccgcagccgccatcgacgctgcgagaggatccgtaatggtgtgagatcgcccgcgacgtcagaaagaaggagggggtggtgccggacgaaggctgccgggaagaggtgggtgtctggcgcatcgctcggcacgagcaggtcaaaactctccttgccaagcacctcaagtcgatcgccggcacgacggtcaagctcgagccgttcgtcccgggctcgcacctccggaccgacttgcgcatcgccggaacggcctcgtacaacggcccgctgtccgagttcgacgtctcggtcgtggccgcggcaaccttgggcggtcgtcggccctctgccgcttctctttccctctctgctgctgcctctgcctctgccacctcctccctgccctcgctcgacgcctctctccctgccgctgccctggccgcttccagccttctcggcccgctcaccttggtcgagaacgagaagcgctcgaagtacctcggtcgcaccgccacccctttcttccctctcgttctctctaccgccggcaccctctcccccacctctgtccccctcttcgaccactggcgcgccctcatgccgtcgtacggtctcttctcccgcctcctctctctctcacttctccgggcgcgtgctcgcttcttcgccttctaggttgcgctcccttcctccgcctccgtctcctcccctcgtctagctctcgaactcctcgcctcctgtccatagacctgcctttgtcattgcatgtccgttacaccctaaccccaatctcgggtgcctgccacaagagctgggtcaggggctgggttgggggagctatgatggacgggcccggccgaccttggctcctctcattccgcctcggctgaccatcttctcgccgcccgcttgcagctgtctgcgcctctcctctcatcaacgaggcatcccatcctattcttccgtcgccttaatcgagaccacgccgcctcgaatggtcgccccgccattcgtccggccggacgcctcaagccgtgcgttcatcacctgtcgccctggttgcttcccgcttgctgacattacatcctgctgcccgccattctgctgtggctcttcgcaggcatccttcagatgggtcttcgcttgctagctcgtgatcggctcgtcagccagcgtaaccaggtgcgtcgggctgctatcaatccttgtgaagccgagagttgaccagtgtctgcgcgcctgctgtgcgtcgcgcttagcttgctcctctgcacctcgcagcgtccctactggcgccatagcttgacgatttgctcgcccacatcttgctcgaaaggcgctctcgtgcgccagccctgtactccgcttgctatcctgcatccaggtgcgtgcgacttctgctcgttcgcgacccgtgctggacactcacctgactgccccgctcaaccgccgatctacacagcttctctccgctgccagcccgaaatcagacaaaacggcgttggacaccacgacttgcttgtgcgtccttcctcctatcgcgtcccgcctttgcgcggcctgcctgacttcctcccgttgaccctcgctctcgatgtccgtccaggtacggtaccttcgaagacgtcctcctcgatacaacagacgcgactacatatggcgcaactacttgctgcagttgtcgtccaaaggcaagcgctacgcaggcgcttacgcaggtcgtcacggctgtctttcgtgcgtgttgcttggcacgccccccacaatgctcttgttaactcttggtgtcctttccgcccttcagtcgcgacaccatcttacccgaccatcaccatccgcagcgctgcagcgccttctcggctggcgataagggaacggactgctgctcgtgacgacgcccggctgcaggcgatgcggaccaaagtctgccagacccaggcgacgctcgactcgggctcataggcgcccggcgtgctcgactctagcctgacggcgatcccggacgacaaggaagacggtatatctcgaggaggtcgcccttctgcctgctgtcgtcgactggctcaaaagcctcgatacccatcgaagcgtctctgactgccttcgcaaactggtacctatccactttctttcttcgaccgccgcgccaccaccttgaccttgatgatatggcgacttggcgagaattagggatgtgcttgatgcgtacgttgcgtcgggcgcgctctgcaagaaggtgggggcttcgggccgggctttgcctcccaacaacgacacgcctcgcctcgcctcgccttccttcttgttacgaccctagatgccagcactcgcgacacgctagattttcctcaaatcccctcgcttccgatgagcctcgctcctgctcgcttcttcgtcttccgcgccgtcagcagcacaccgctccgagccggccgaaatctcgttgccgccgcccgccctgcccgtgacgactccgcccggacgacgacagctgcagcatgctattctgctagcagaagctcaagatcggccagcacaagcacgggcagcacaggacgtgacccgagcagcaaggcctccaggaggacctcgccgccgtcacctggcagctcgacctcgacaagctccaaggtcgcttcgacgtccagaagctcgcagtcggcccgtcgaacagtctggccggaggctagcccttcgcggccgtcgtctgcctcggactcgcagcttgcggtcgctaccggacgctcgacaggacgcgaactcgaggtccaggaccaggtgctcttcgcgctgtcggagcaggtcggagggcgattcggcaacgccgtcaagtaagcaggctcctatgctggattgcacgcagcttggctgaccagcggtcttaccctgacaggatcgtcgacctagcagcacgtgttggccttcagacaagcaaggtgctcggcaaggacatgcgggcaaagctgattcgcggcctgatgacggccggcgttcgacacgtcgaggcaggagccatcctggatcatcggctggtgccgcaggtacgttcgcacgctcagggcgttcaccgtacccattttggagctacacgcaagtgctgacctgagcttttgctcgtttgtcgcagctcgaggagacgacggacgtgctcatcaaggttgccaacctcgacagtaagttccacctgccagtctactgcccggacctggccgcaattcagacgctctgcgagggcatccagtgggatgagcacgagcggaacgactgggtcaagggcgagatcctgtgcgacgagatcagcatcatcgtcggctgctccgaggtgcgtgccaagccggccgtcagggggagcagcgcagctgacgtgcctctccttgcccgacagacctactcggtggccaactttgcaatgaccatccgggagcatctcgaagctctccgccctctcgtcgccgaggcgcgcaagctcggcttccgcgttcgcggccacctgcactgtgcaatcgagtgcccgttcgagggccccatccctagcttgcgcgttgccgacctcgcgcaggagctcgaggagatgggttgctacgagattgcgctgggcgacacgactggtcgaggtgaccctcggtcggtgcgcgcgctcgtcgaggacgttgcggtccggatcggtgtcgagcgcatctctggccaggtgcgtacgcgacccctcaactactttctcttgcgccacgactaaacattcgccgcttcttgcagttccacgacacatttggtaccggcatatccaacgtcctgacggccctctccgtaagtcgccagtcccagacaaggcagccttgtcagcgcccgtcgctgacaccttgccctctctccaatcaaagctcggcgtccgcacgttcgacacctgtgcggccggtctcgcatcgtgcccttactcacccgagtcaatctcggcggtcccaaccgaggacgtcatctacacgctgcacaacctcggctacacgacgggcgtcaatctgatcgagctcgccaagacgggcgcctgggtctcgtacatggtcgaccagaaggccggctcgaggtcgcgcgccggccaggccatcctcgcccggatcaagtgggaagagctcagcgaggtaaagcagatgcgccgcgaccgtgtcgtctcgtgggccgagtgggtccgcgagaaccaggtcgtctcgctctgctttgcggcgactgcctttggcgccgtcttctattggaactacaagaaggtgctcgagcacccagccgtcgtcgaacgcaagctccaagacaggctcgccgtcgacatgatcgatcaggccctccgcaagatggagcaggaggagagcgagcgttacgatcggcgtgtatagtcgctattggggaaggcccgatatcatggccgtctcttcgtctgtccagctccagggctgtctcgctgccttgcttgcccggtatctgaagatccatgcaaaatgtacagcggccatgctccccgaacgctgcggagccggccctctagtccaccgtctagatgacgagcagcgacgcgagccgcgcctcggtcgagacgagctgtatgagaaggagcggtagaacgagatgttagcttcaagcgataatgacgtgaaccgggccggcgctacgcacgtcgatcgcctgctcgacttcgagccgcttgcgagcctccttgagccagtccttggcgaggacgccagcccagccctcgagctggttgagctcgcgggcggcgccatcgaggtcgcgccggacgagccggtcctcagcccgggcgagaatgctgttgatgtcgctgccgtcgactggacccgacttcttgaacagcagcggcgagacgacggcgctcgtcaggtgggcgagaacgccggccgaagcagcgtcggtcgggacgagtgcgaccgagcggatccgaggggcgaccttggcggtgaaccagtaagtcaggtcgggcagcgactcgacaccctccgacagggccgacgacgggatggtcgcgaggacggccttcagggcctcgctcgacgaccgcgacagcgatgacgacgacaggacgtgctgcagcgccgtcagcttgtctgagatcggctgccgcggctggtcaagcgacgactggaccgcacggagggcgctcaggagcgtctgcgagagggctcttaggtcagcagcgagcaagcgactgagatgaaatcggccagggacgcacgtggatgcgggtgttctcgtcaaggaccttgctgttgtcgagcgttaccttctcgagctccttgaggccgccctcgagctcgccgagcttcgacagccggccgccacgctcgttctcgacgtgcgtcttgatctcgcgaatccacttgcgctgaagctcgatgccctgcgcgacaacctcctccttgagcctgagtcgggagagcagcctgcgtcagcgggagccgtagaagcgcacgcagatgcgagacgcaccgctcgttgacaatctcttgctggacctcgagctccttctggaggcgctcgcggaagttctcgacgagccgccggcgctcgtcctcgacgacctccttccagccttcctcgcgcttctcgagctcgttgctcattaggacctcgcgctccttgatctggctttcaaactcggcccgcttggcatcaagctgcttgtggagcgcagcctcttcctcggccttgatcgtgtcaagccgcttcgagatggcgtcaaagtcgagctgggcggtcgagatgagcgacttggcctcgttcgatgccgacggcaccgacgacaggtaggtcgtcagctcgtcaaaggtgcccgcgagctgcgagatgacggggtcggctgccttgagcgagggcgccagccggggcaggagctcgccgaccggcgcgggctcatccttggcgaacggcttgaccggcttgcgctcgacgtagtagcccggcgggggctcgaaaccgatcgggaggtcctcagtccagagcgtcaggccctgtgcattctttttggcgggaacgaccggcttcttcgcgacagcagcagctgcctcggcggcgtcggctgtcttgtgcgagagcgtctggaagccacccttgagggcgtcctcagcctcgatgacgagcgaggcgaggtccttgccgctggcgacaaccttgtccttgacggcaccggcagcgtcctttgcctggtcaacgacggtcgcggtcttctcctcggcctccttgacggtcgcccggtcgagcgtgagcgcctctttggcctgggcgatgccggcgagcgcagcgttcttaaggtcgactgttttgtcctcgacggcgtggagcgccttaccagcctccttgccagcggcatcgatcgcgtcgccagccttgtgcgcgagctcatcgaccttggcctcggccttgtgcgcgagcgagacggccttctgctccgtcttctcgaccgcccggccgagcttcgcctcagcgtccttgacggcggccgaagtctcggactgagcggccttggccttagcctgcgcggaagcgagcgcctcggccgacttggccgccggcttggatgggatcggtgtgaagacggcgccgggtgcggctggccggtccgacggcgccggcggggtcgcgccagaggtcgactgagcggctgccgaggcggtcgacgtcaccttgcggtagagcgccgaggcggcgctaagaagagcaggccaacagggtcagtgactgatgccttcactaaaggggagctttccgagcttgctcacccagcgacctcgcctgcgccgaccttgtcgaggcccttgtcctcagcccactcgatgcaggcctcgccgccggggacgaagccggcaaacatctcctcaaccgtggacgactggagcgaagcgtaggtgcccgccgagtagaagccggcgctgcggtagagtacgtcggatcgtcagtctcaagcagcaggtctctgacgcgtcggcgcatagctgacgcccgtctgacgctcgtccgaccacaagcaagcaaagagcgacgtacgtcagaagagccgtgtagaggacaaagcgcctgaagccgccgccgctcttgcgaggcggctggagggtcgacggcggcggcgtgacggggacgacggggacgacccgggccgccgagccgccggcgggcgtgacgacggtcgggacgacgcgctgctggacgacgccggcgggcgtcaccttgggcgggccggtcgcgaacgaggccggcgacgagggcggcggcgcggcgagcgactgatcaagaaggggcggcagggtacgtcagggccgggtttctgcgggcgaagaggagcggcggcggcgcagatggcactcgcgcccgcgcgcgagcaaaggctcctcgaagacgacgtacccggcgcgactgctggacgaccagcctcgagggccggagtgtccgctgggcgagcgacatggcgggagagagagaaaggtcgaaggaaggataagggggtcggacaggggagtgacggttgcaagggccgcggctcgacagctccgggcgcgaaagacgaaacagatcgtgcgcggtggcggcggcggcgcgatggctgcctgcggagggatgagtacgagcagcctgtcacacgacacgctccgtctcattgccaactcatgagatctgctgttctggtcattcatctcagccgggttcacacctcgggcccttctcccgctcgcgccctccagaacgctttgccgtacctgccgaagagtcatcgagcacacttcttgtcagcaattcgagcccgacaccccaacgccagctgataaggtcgcacgagatgaggatctcctggcccttttcgatgccctcgtcggcgccgacaaaaatgcccatccggagctcgcccgccccggcctggagccgctcagccggtgtcgaccgttccggatctagcacacgcccggccggctcgagcgtcgtcgtccgcattgaatggaagaaggcgtttggcttcgctttcggcgcgaccttgcggcccttcttgtcgagcgtcggccgggccgaggcgggtgggggcgtcccgcggtagtcgttggccatccgggcctcgttgcccatctggctcgcgtcgacggcgaggccgagcgaggcccactcaggcgcagtgccggacgccaaatccgacggtaacggcaggagggtcgatagctgcgggacgagcgctgccgagaggggcggcgagcagcccaggtgtcagcgtcaatcgaccccgctgcgaatgacaaggcgccgcactcaggtcgtagtcggatgccgctcggattgctgcctgttgcggaagcggctccgggtcgatatgcacggcgccggtgtacctggagggccgacaagagttgcagacgtcaggacgacacaacgacgagaggctgaccggttcgctcacgcgcaccatatgacaagttcgcccttgacgagcttccggcgcgcgaagagcccgcgctgtccgtgcgccggatgggccgggttgtctacgatccgaatctcgactttggtcgacggcttgtggattggcggcggatgcgccgagcggatcaaggcagcgacgtctggcgggaggtgcggcgagtagaagggggccgtctagggcagcgtgtgcgaagcaagagaatcagtccggatcagctcgacgtcagtctgcgagctggaaggtccacctaggtcacggctcgcaccaagtagaagacatcggcaggccagttggctggcggagggtgcgccggtcgaggcggcacgagcggcggcatgcaggcagggctcctgtcgtcagcaggcggataaagccagcaggtcctgctcttcgtgttctggtagacgtcgtgacctgctctcagcagcagcagcagcagcagcagcaggcgtcctgctgaggtcggagcccggcggcggcgtcgtcgttggcaggtcgggaagcggtcgctgctgcccggccaaaagaggaggtcgccggcgatggccgacgggagcagctcgtcccaaagaacgtcgacctgttccctgtcgcgctctttgcagctaccgcaaaccagacgcagattagctcgatggtcggctcatcctccgcgtccttcctctgccccgaccgtcgcaggcgtagccacccagggcgccacgttgactgatcgtccgcagcaaggctagacccccctgtcccgcccgggtagcggcccctgtcgaccaagccttcaccggcacgctcgcctcggcccaccgcgtccaggggaaggcagccgctgcggtcggtcggaagggagtcggcagaggctagggctgctaaggtagcagggcagccggctgccctcgaggccttgaccctcgtcttcgtcacctgtcgagtcaacagcaacaggaacgccatgtcgcgctcatcgcctggctcgtcctcgccctcgcactcgcccacgccgtcaagcgacggaccaggcggcctcgtcgttcgccagttgagacacgtccccggcctccaagacgacgacccgccggtcctgctcgcgcctcggcctcgcagctggtcggtcgcccgacgggacgcctctggcgaaagctcgcccgaggtcgtcgaacgcctgctcggcgctctgctcggagaccagaccgtgccagtcgccttgcacgtggatgagagcgatgaggccagcctggtctcctcatcgcgcggctcaagcgcatctcctaacaaccaagcagccttcacgccgaccgacccgccttcctcatcgcctccgtccgaccctcgctcgtcggcgtacacgctcgcccgctcccatcagccttcctccccttccatctcgacgtcgtctgcctcgtcctcgcctcggcctgaccgcgtccatggggcgccctcgccccactcggccgcagcccaagaggtcctccgaacgctcgcggcgatggcctcctcctcccggccgccctctgacgagcgcgcgcccttcgcgccggcggacatgcacgaatttgagctcgcagacggccaccgccggccgttcgacagcgcgggcttgagcgcggtcgaggagcgcaccgaggagtgcacggtcgcgagcgggagtgcaaggtcggcactcggtcagcgcttgtacctagtcagttttttttcgcgccgtctcttcttgaaccttgctgacgcccctcgcgcgcctctgcaggcgtcgtctgacggcgggagcatcgccaacggccttccgcttcacgcctctaggcctccgacatacgtctccgacagtccaggcgcgctcgccagcagcccatcaagggcccgaacgcccgacccggcaattctatattacgccgagcattcaccccctcggccgctgtcgagcagcccgacaaagcgcgatgtccggcttctcagcctcggaatggccgccggcgctccttctgctggaccgcgcgcgcccggcgccagtcgttcgacggcgagcctcatcgccctcttcgagaatgggaacggttctgtcggatctccagcgtctctcggcggtgcgacttcgattgctgccggcgagcgcaagtcagccccgctcctgctgcagggcgtcggctcgccgccgccaagtgcgttcaacagctttccaagccggctcagcgaccggcggacgtacctctcgcccgtctcagccgcctccggcctgccaggaatctcgccaccgtccaatgcgtcccgctcgtctgctggaaccggcctcccgcggcgaagcgtctttgacctgccgcagtttctcccccgcacgcggtccatctcgcccggcgcggccaacgtcctctcgcccccgtcagccgagacctcgcgcctctcgcggcctagtcttggacgtttccctctgctgtccttcggcggcacgaccgacaagggcaaggcgcgcgacggagatggtccggccgacgaggacgacggcagctcgccgctcgaagcgctaacgccgcagccgatgcttgagggccagctaccgcctcttcctcgcttattgtccgagggcgacatcctcagccgttcgcccgccgacgaggcgccgatcgcatcctccagccgctggcgccgaccccgccggccgagcttcagcaacctcgcctcggccgtcctcggcggagggtcgcgtaagcctgcacctgtcggcggcaagagcggccacagcaggacgtggaccgaggcagccgtaccgctcgtccgccgcggggccgtcgtcgtccggtcgttctcgcgctctggaggccgaagccggcgtcgggccaactcggctccgccgagcgaagctggagacgggctcggagaagcgcgtaacatgcgcgacgaagttgagaagggcttttcgtggcgtccagaggctccggtagcgctcgtacctaacgtcatagcctcgtacgaggacgtcgacgacccgcccggtccaacccggcacacgcgtcacactctctttgacgcttcgccctcgtcctccgtccgtcccgagcacggccatctgaccgcctcgacgggctcgttcgcgccgatccagaccgccagcgtctcgcgcacgtcgtccttcctcggcgactcgccctttacgatgctcgacgcgccgtttgcgccgccggccagcatccgctcgtttgacccgaccatcgagcgcgacctcgagcggtcaagcacgatctcgaccgtcgcgaggaccgacgccagcaacctctcagacggcgacagcagtaccggcgacgacaacgacaacgacggcggccgcgaccgcgagcgctgcgatcgcagtcaagaccagcactttgcgcctggccccccggcaccctccgacctctcctcttcatccaacccctccaacgactggcatcttccgccgtcggtcccgccgacaacgacgacaacctcggccgacatcaggtcaaccgagacggtgtcagctgcgtcgagctcaagaagccggcgcctgtcgatcgacttccctgccagcgtccgaccggcgccgacgccgaattgcgcaacggccgcacactcgagcacgagtctcagcgtctcagctctcggcagccagccgtttgatacggtcgacccgggcatcttgaccgtgagtgacgctgcgaacgaatacttgctgccagtcagctaactgccgtcctgcctttgccctcgtaggacgacatcagcaagctcctccttttcattcagcgccaggagcaatggcggatcggtcgggacgcgctgcaggccaatcagctcgagcagatccagcaggaggtcatgacgctgcgcggcgccttcgtcaacggagggccgcccctcccgcccaaggatccaccctcacctccaacctcctcaacgccatcaagcacgagctcgtcttcgaccgccaggcccggccctctgaccgacgacggatcttcgacccagaccgacgccgcagccatccagctcttgctcgagcgcattgccgaagccgagcaagcggtgctcactcgtcaggacgacatccggcaacttgtcacagaagacagccggcgccggcgcgaggagcgggaggcccgagccgccgaggcgaccggcaagaacgtgacgctgcaccggctggacgatctcctgcggtacgtcttgctcgtctgtgtacgggctccaaatcgtcgagctgacgctcctctgcctttcttgccgtcagccgcgtgctctggcttctaggtgacgaagttttccacggcgaaggtggctcaccgaccaaggaggagtcgatttacggtcctgtgcgcgcagccaggccctgaatgtcaaacgaccggccggcttgctaatctccgtttcaccctcgctcgcaggacgtgcgctcctacctgacgcatccgccagcgagcatcagcgatctgccgatcgacaaggactcggaaaggtgggaggagtcaggcggcagcttcgtttcgcgcggctcgtggcattcgtccgagcgtagcgtccgccagctcgccaacccaccacccactgccgactctgccggattcagcacgcggccggcgacctcgccccttccaagcgtcgggtcgctctcgacgccagctcagtcctactcatcgctgccgccggcttcgccaatctcgatcgtccagtcacggctcgatgagcaagaccggaggtgggatgagatccggcggaaccgatccctccctcggcgacccgcgtcggtcgtctcttcggcatcgacaattcgccctgctctacgcactacgctacctccagagatcgatgacgctctcgacgagctcgcccgccgggccgaggagctcgacgagcgcgagcggcgactcgacgacgacgagtttcgcgtgcgggaaaacgccgacgcacaggctcgctggctggccgacgaaaccaaccgactggacgaaaacgaggatcagcttcggcgtgtagtcggcgacgaggccgcgcgcgtttacagcaacctccctccgggacggcggcgttcgaccagcgacctcagcgaccttagcaacggacgagacgcccgcgaacgccagtcgagactctttcagcaccctgtcaacgagcggccggcggaaccgcagcgcaggcctcttcctccacctgagccgatcgacttgccgtcgcctgtccacgaccgcggcggccggcgactccctcgcgatccggatcagcggcctccgctcgactttgaccggcggacgacttcctcggccctgccatacccagagccaatcccgtacccgaggatggtcccgatgcggccgaccgcgacaggtgcgcgggcgcccatcactcagccctttatcccgcgtgcgtcgcgctcagccatcgactcagcctacgcagactacggcccgtacagcgcgcgctctaggccggggctctttggcagctggttcccgcgccgcagcggccggacctacggtgtatgagcgctgccgctgcctccaggagccgccgaggtagctgacaccaacctcgccgcccttgaacctgttgcagtacccgccgccgccaggctaccttccagccggctacggtcgcggcccaggttggcttggaggctacccgccgccaggaagtctcagccgacgagacgcaagcgttcgtcaactgtccccgactttgaagacgacgcggcagctgacctattcgctcttctcagttcacgagcactcgccgctcgcctagcacctcggacgacgagcgccaccagacgactcggcacgtcaatgaggtcaccgagcgcgtcaacgacctgcagaaggaagttcacgacctgcgcgatcaccaagcgtcgacgtcggcaccgacgctcaatgcgacctttggacctgtaccggcgcctacgacggtcgatgcgacgggtgcgtccttggctgctttgttctttctccccgcttcgcaagtagctgacttcctcaccgtctcccaggtcggccgactattccgctcgaagcgaccctcttcgaaggccatccggcaacgcactcgcgccgtagctctgcttccgaacgtcagccggtcaacgtcaccatcaatgccccgccggcgccgactctgccacctgcgccacccgtccctcgcccgagcagcccgcctggccttctcggcacgctcaaggaccttgccggaccagccatcggtggtctcgcaggtgcggcgcttggcgaccggcatggacgcaaggaagaagagaaagagaacagtacgtgcgacccctggcctccgctctcgagtttacggctaacttggtgctttcctccccatttcatcagaggaggagcggcgtgaggagcgcaaggccttggcagaagagcgcaaggccgacgagcgggcggcgcgagaggcggccgccatgcgtcctgccatcgtcatccctccgcccgcacctggctctgcggttgctgtgccgccgcccggcgctgccttcacctcaggcagtgagcctgccgctgtcatcctgccttcagtggcctccacgcctggagcggcgaccgtcatcccgcctcccggccgaccggcattggcagttgcgccgtccctggcgaccgaaattgctggccaaccggtcgtccagccgactgcgcaaccccccgtgttgccatccgctcagccgggtctctcgaccgttgctcccctcgtcggccagtcggtagcgcagccggtagcccagcctgccgtccagcccgtcgtccagcctgtcgtccaacccgtcattccagccgtagttccggctgtgacgaccgcggcattgccttccatcgtgcagaacacggcgccacctgcgacgacgacaaccagcgcctcgtccactcgacccttgcctgttccgggcagccctgcgctgccggccaagaagacgacaacgacgacgacaacaacggtctcagaagaggcggccggcgagtcaagcacgaccggcgcctacacgactcccgcgacgtctgttgcagacgtctttcgtcctcaggcgccagtcatcgctgtaccaggtccctctatcctcaagaacccagcaacctctggccccgaggcgcccgtcgtcgtcgttcctccacccgggcaggcgctccagtctggcggcaaagtcgaccctctcgccgacccaggcatgctcgtgcgaaacggctctcgccgcccggcggtcacctctgcttccaacgtcaagcccgccacccaagacgactcggcgccagcagagacccgagccaatcttgcatctgcccctccgcaagccttgccctctactccggcagctcctggcaagctgacatctatcgccaccgccgatcgaccggccgcagtgccatcgactgcgcaaacgtccgcgcctcctgcagtcgtggttccgcctgccgctggcagcagctctcgcccgcttccggccaaggtagcgaccacaaccgtagcagatgatgctgtcggttcagcgccgggcgtcaccgctgtcaacgctcatccaaccgtgcccgttgccgtcgtcgaaggcgccaagccggagcttttgcagcctgttgaggctgccgagccgcccaattcaatcttcaggcgcggccctcgagcgcctgccgtgctcacggttcctgctccactcggcaaggcacctatcgtggccgtggtcccgccggcgacgaccatcgaggggtcgtctacgagcgacaccccgtcaccgtctagcaccggtccggtgccagcgtcgtccactaaggctgcgggaccgaccgacaacgctactcgcccgctttccttaggagcaagtactgccgacaagaaccgcaaacccgttcctgccatcgtcgatggccagccggccgtacttccagtcgtttcgctcgccaatggctcgacaccctctcaacccggcgtcaccgctaacccctcgactcgaccagctactgtcgacgtgcctgtcacgagttccagcgcctcgacctcagcaactcgccctctggtcgctgtccctccgcctgcaggcagtgcggctcctcttgctgccaaaccacctgtcgccgtcgtcgttgccgccccgaacggtcagcctgaagttgccggtgtacgcccaacagtcgcagcaacggtaccagccgtcctcgtctctggccgcaaggaggtcattccatctggtggcgtttctgttctggccgctgaagcccagccgactgctggcccggtggttactgccgctccgccagcagtcgttgctgtcgccccttcgacgggcgtgccgactccagtcgcggctcctttgaatccgtctatcgtcaagccaaccgcggcaggacggcctcctccgccaccggtcgcccctattccggtccccggagccatcatcgatccagtcgaaggcttacgtctgggcgacaccgcatcgagtgcaccgctgaagcctgccgccccgcatgtacctcgtccggctgctgttttgaccgacgcagcacgtccgccggtcacccaaactgccgatccaacccggccgccggccgcaacgctttctgctgtaactgcgccggtcgtcttggacgccaacggtaagcctgtcatcgttgcccctcccggtcctccgagtggtgccgcggcgccaccgaagccgattcttgcctcgagcgttgcaacgactgccggcgcgactggcaagcccggcgtcgcacctggaccaccaggaggtgggccgatgccaaacgtccccggcgctgccgctgctccgccagttgcggtcgccgtcgcccccctttcggccgagatcacgaaactgctcgacgagatgtctaacgccagggctgagcagcaggccgccatcaaggcgattgcatccgaggcggagaagaccaagaaggagcaggccgccctgctcgccgctctcggtgctgagatcgacaaggcgaagaaggagcagcaggcacaggtcaaagcgctcggcaccgacctcgacaagagcctcaaagcggcgcagaaggtaacaacggacgagatgaagaagacggtgagcagatcgggtcgaaagcacgaggaagccatctagctgatgtctcgcctcgtctcaccgactcaggccaaggagcaggtcgccttcaacgtgaacggccacctcgacgagttcagcaaggcagtgagttgtctcttcggccctcgtgccttctgcctgacgttaacacaactcacgctttccagctcgccggcgaggtcaagacgcttatgaaagaggtcggcgacttgcgcgaggctaagcgcgccctgcaacagtgtgtcccaacccttcacatttctgaacgcctcatcgctaacactcgcgggccacctctgcagcgagatcgccgaccttcttctcatcaaggcccgacatggcgcaggcgacggcatgaaccttttcccctggcaggcgccaaaggtgcgaatctacgactcgagtaccttctttttttcgtctgacccccttttctcgactcctcgaccccaggccggtggtcccggcgccaaagctcccgcagcagctccaaagccgcccactcagccagccgctcccaagcccgctgccgccccagccgctcccgccactggcccgtatgcccctccgtgagtctcgccgccaggtcctttcctcaggaaacccgctgaccccttgcgattgtagctggtggatgggctacgctccgcctgcatccgccgcatctgtcgctcctcccaagccgccggtcgtgccagcgccggtgacgcagcagcagcccgtctacatgccgccttgggcaatgtacggcccgccgccgactggaggctgatcaaccccacgtatgcgagtcgcccggcagaccttcacggcgcactaggcttggtcttggcaagagcgaggcgcttgggttcgctcgggacaacggtgctgcttgacgaggagcagacaaggcgatgcatgattggtccagaatcagtcactaggatgctgtcgaagcccggcggtcgaagatgtctgggcttcccgagctctctcatggccgcccgtctccttgctcgcctgcgctgcactcttgactagccggcaatccaaacgtaggagcagtgtgcatgcagtcatcaaggggcaggtagaagggcgtcgacgagccgtcgcgcgttacaacgaaagagagaaaggggaaagcaggttgtcggccaggaggcggcgcccttcgagaacgcccagcagcgcgacggccgacagattgcggagggctcgcaggcgtgaagtcgagttgatgcttgcgtaaggcgcggaagactaggccgctgcggtctatgagagcccgccggccgatcggctgcggctgaggttggtgccgctggtgccgctcgttctgcagcaagcaagatttcgcgtcagctcagtcagctcagcgtctcaagaggagcctctcgcaagtcgcagacagggagacgcacccgagcagggcgaggtacgacttccgcttcgggtccttcttctcgcgttttgcctgcgacttcttaaccttggcctcaggccgaacgactatgacgggcacggccgagtgcgagatacagtagcgcgagacggagcccatgccgggtgctgcgaagaatagagcgtggtagtcagccttgggcgcggcgaagcgtcgctgcgacgagagcagcaggttcgaggatggacccaccaccgagagcggcgccccaaagggccagcttgccgcggtggccccgcgtgccgacgatgagcgagtcgggccggtaaagtgcgatcaggcgcatctgcgagcggggcgcaaaggagtcggccacgtctcgtcagccccaactcagacgcagacccggccgagcccgacgacgcacgatactgtccgtctttttgccggcgacaaactcgacgacaacgctgatcttgcggtcctcgtcctccgtcgcattcttctccatgatgagccgctggagctcgcgcgcgtcctcccggaattcctcctgtttctttgcgctggcgcgctctgcgcgaggcaaagagagcgacacggggtcagcaaagaggccacatcgaacgacggtcggcgctcggcacgcaccatcctcatcgagctcgacgacccggagcgcgacgacctcgtcgccgtcctcgacaatgttctccatcgcccagtcgagcgcctctgccccgctctcgtcaggcgagacggcaatcaggaagacgcgcgtctcgcgcgtgcgcgtgtagtcctcagacttggctggcgggaggagttcatcggtcagcgaatgcggggcgattgtggcggctgcggcgtgcaatccttattcagcgagatgagcaacgcggatcacatcgtcgtacaagcgaggcccggccgacatgtctccttcagtcggacagaggagcaggtgtagcacagacttaccctgtagcgtaaaggagaagagggcatcatccgaggtgtcgtcgaacgtgtcgaagccgactgcagcaggtggcagacaacgagctcgagtcaactcaagcgcccttccgacccacatccaaagccagtcgtccggctgaggtccaaccgctgtcatccgctgctgctcatcgcgagacgaggccgtcgagcctccgcagcgtggtgaccggcggtcggggaggaccccgcagcccaccagacgagccttccttccttccctctcctgcagagacgcacccttcggcttgaagcccttgccgaggtccgagctcatcgtccgcgtccgcttgaagccgctcttgccaccgccgctgctcgcgcccgccgccgcctctttcccatcgggcgcgaggccctgcgggaagtggatgtgcgcgccgccgccgccgccgcctccgattgcggcatggtggtcgatggcggtcgacgtctgcgagtaggcgaccgagccggcgtcggtcgtgtcgcggtgcgagtgctgaggcgacgagccgcccgagaggactgaacggagggccggacgcgagctcggcggcgaagaggtcatgcaagggagggctgctgatggtggtggtcgtcgtcggaggggctgcgggagcgaaacaagccagccttggccagcatcatcgccggagacagacgagacagagcggtcggtcgccctaacaagtaagtcattgatattgtctgctaacaggcgtgcttgctgatcagctgcctgtctttctgccagtctgttctgtccgactcataaggcagacgagcgaccatttcggctgtcggctgtcgggcgcggcggcccgtcttcggagcgcgtaggcgtccacgcgcgcgatcactcatcttcgccggcggtaggcgaggagtggccaagggacatgtcttaatcggacgagagaggtaacgagcgggggcgagtcatggaggcgatatacggtctagcgacggcgggtgagggagatgttcggacggtatggagcgcgatcaagcagggcgggcgagcgggcgggagcaaggttgtgatgggataagcctgaatcgagggactggagcgaagccaggggtaaccaaaggagagggaaggagcggagggcgagatggagatgagtcgaaagaggagcgggaggaagacaggcgaagcgcacgacccgaatctcaatccaattgcactcggctgccgcacatcggtcgtgtttctcgcagtcaacaggcactcctgcgcggagtaaatcgtctacaagatgcatgtctcaatcgggcaagtaggcaaggaatgtggtgaaagagaggaagggggtcgtcaagcgcgagagaaagaagcagatgcgaagcgagaaactatgtgtgaagggaggagaaacgagctaagcggggatctccccgttgtagttcttgtcctcgtcgagagcgcgtgccttgcagacatccacaaggtctccgtggatgcctccctttgcgggacgaggaggcggcaccgacgcgacgatacgataatgctcagacggcggtaccgagagcgtcgtcttgtcggccatcgtcgcctgcggctgcccaaaaggcgccttgggccgcgagctctgcgagttgagctgcgtctgctgaagccgctcggcggcgtcgggcttgcggtcggggttgatagccgatgtttcgaagccatctttgaggtgctcgacctccatgccagcctccaagatgccaacgcgcatcattgccaagaggttgtgtgcagcgttggaatggtcatagacgccgccaaaaaaggccgtcgtcgcgtcggtgccaatggcgcgcttgatgaggtgggcgccgccagggtgctcctgctcaaacgactcgcagtcgatgatgtagccgtggacggccatgatgggccggtgtttggcctcggcaacaaagtcatcccacgagacgacgggcagctgggccatcgggaccggccacttgagcttctcggtctgctcctggagcttcttgagctgcatcgtgtactggccctctgcgacagggaggaggagagggcgtcagcggatgcagcgaaggctcacgctgagagatggaggagggctcactcttgacctcattggcggggaacgacttgagctgcgaggcaaagccaagcttgtacatgccgtagatgaaccacttagtggggtcatactgataccagacaatggcattgcggtagtccatggggaactaacgcagagcagagagtcagcggcagagctcttaagaaggcaaacggcggcaggacgcacctggtgatggaagttgtggtacccctcgccgatcgtgacgagcgcggtgaggaagtggtcgcggggcgagtgcttgtcgtcgaacggcgtctcgccgagccagtgagcgagcgagttgacgcagaaggtcgactgaacggggggaggggggcaaggttagctgctggctccgaggagatgcgagcaaacggacgcacgtggtgaacaaagcagaggcgagcggcgccggcaaagaagaagccacccttccagtctccccagcctaggccggcgacggccatcgggaagaggaaaccgaatgtgacgatcaggtaaagataccacttctgctgccacttaatgaccttgttgcgcgagaggtcagaaatgtcggccgtgccgatcgcgcggcggggcttgatgagcatccaacctggaaagggcgaaaagggtcagtgacattgagcgacgcgacgacgacgacgaggcggacggaccaatgtgcgagtagaagaagcccttgtgggcgttgtatgggtcgaggtcggtatccgtgtagcggtggtgggcgcggtgcccacgcgaccaccacttgatggacccctcaacggcgccggcgccaaagatagcaaagaagtactgaagcgcaggcgaggcgttgtaagaccggtgagcccagagccggtggtagcctgggggagggaagggaaaaagaggccgaagaatcggcgatggcggaaagtcagtggagctgcgcgggcgggagatttggggccaggcccagggccggctgggggcgggcgcgcgcgggcgagcccagctcgacccctggcaggcaaagagaaggagaacgcaccggccgtgatggacatgccggtcatgaagtagtagccaacagcccagagaaaggtcttgagctggagagtgtgggtcgcgaagccgtagatgccgagcgccggggtgacggtcagggccaggaacgagacccactgaatattgtcgagcagggtggcgagcgtgacgggcgggaggaccgtctgcttgtcgagcgttgcctgaacgtagttgtccggaattcggaggtcgaccggctcgcgcggcgtcttgggctcggcgagggtcgggatgagcgagtctgcgggaaggaagacgagagaagagtcaggatcccgattcgaccggagtggcgacagacgtcaggcgacgacagggacccatccgcccgcttgaccgccgcgaggagcgcgaaagagagcgactgacctccaagctcggtcgccttctggaggggcgagagcggcggcgagatcggggcgctcatcggctgctggaccttgcgttgccggagctgatcgtcggcggcggctgcggacatggtgcggctctccgaaccccctcctgctcgcccacatcaacatcggctccctgtcgacctccttaagcctcgccgtcattcgcctgctcccgccgatctgctctcctttacagcgctgtctactcttcgctcagcgcaggacgatgagctcctcaacctcagcccacgccggcggcccctccggtggcggtcggcgcggtcggccagctcgtgtcgttcactggtatcggactgaccttcgcgtgcatgatagcccctcggtcgccgctgtacgtcctcgccgctgcctgctgtttcgaagctgggagcgccgagctgacgagctcgatccgttggctccgctgcgccttgcctcaggctctcgcgctcgagcccaagatgctctggcccgtctggacctgggatccgtaggtcctatgttcaatgagcttgattcagcgccgcgatgcctctgcctgacccgatatgctactccgatcttcgcccggccctcgcagagcctacgtctaccagcaccgcgtcggcccgaaccgctggcgcttcctgctagagtcaatggccgagctgtcggcctcgctgagcgcaatcaaccccaagcagcggctgcacgtcctccgagggtcgccgcacgaggtctttgactggatcttctcgcgctgggacggcgtcagccatctcgtttacgagacggtgcgtgcgcgtccgcctctgtctgcggcctccgggctccctccgagactgacgtcaaccctccgttccccctcgcaggacacttcagcctacgccaggagtcgagacgaggtcatcggtgctctggccaagaagcacggcatcgaggtcgtgcccgtgctcggccatacgctctggtcggtgcccgacgtcattcgcaataacggcaacaagccgacaacgacgtttgcccagctggccaaggcgactgagaagcttcctatgcccgctagaccgctgcccgtaccagagaatctgcccgatccgggaccggtcctgctcccggatgacgaagagggtttcctcggcccgagctgggtcgcgccggtcgacctgaacagcgccgagttgggcggctacaggtccgagcctccgtcgtgctttgacctggcagagagatcgtcaacaactgtccctacagaggcctccctggctctgggcgcagatatcgaccggacgatccccggcggagagtcggccgcgctccatcggctccagcggctctgtgccgacccagcctgggtcgccggcttcgcgaagcccaagtcgagcccggctgcctgcgtcgacgattttatggagggcgaagtctaccggggcgagtatcagggctcgagcggcaaggctggcgccaagcaagtcggcggcggaagcacattcgtgctcagcccctttctcaagtgcgttgatagcgcatgcttgtctcgactggcgacacaactgaccccctccttttttgacgactaggttcggctgcctctcggtccgaaagttctggcacgacgctcacgaggcggtcgacgtatacaaggcaacggccaagaaatcggtgagtgtctttgaggcgcgcaccgccaaaaccgactcgctgaccccaccctttgaccgcaggacaagctgccgggcgagccagagaacctcgccggccagctgcgcttcagagagtgctggatctctgccgagtatgcgacgccaaacttcacgcgcatctacggcaaccctggctgccggtgcgtcctccctcactgtggtggctttgaccgtcgaggtcctgatccaggcgctttgcagttttatcgactggaagtgccagacaaagtacgacaatgagggcgccgagatcgttccccggccgaaggacgatgacccgctcgccgaagagcacctcgaggcctgggtaagtcatggtcgccctcatacccctcgccgcccgttgctcaaacctcgcgccttcctcgccgcagacgtacggtcgaacaggcttcccctggatcgatgccctcatgcggcagctgaggcaggtcgggtggatccaccatctgggtcggcactcggtcgtgcgttcggcacctttggcagtaacacatgaactaagctgatcgcgctttctctgtcttcgcaggcttgctttttgacccgcggagtgagtcaaggcaaccctgcacagcaatgatacagcgctgacctcctgagcggccattaagaacctctggatatcgtgggaaaggggccaagaggtgtttgatgagctgttgctcgactgggatccggcctgcaacggtcagtctttgtcttcgacgcctcactcagcttatcactgacggaaccccttcgacagcggctaattggcaatggttgtcgtaaggagcctcccccttccccttctttgtgccctgcctgccctgacatcccccctttgatcctcagctgctcggccttcttttcgcaatattatagggtctactcccctgtcgcatttcccgccaaggtgcacagcatgttcccacccaggccgtacccgactgacgcctgttactcggcccgagcagtgggacaagacgggccagctcgtccgcaagtactgccctgaacttcggcttatgccagacaaattcgtttatgcaccgtggaacgcgccgctcgccgtccaaaagaaggctgtcagtactttttccgcctgccgagcgatccagcttgaatgcagcgactgacgttgttcgctgttcagggctgcatcatcggccaagactaccccgcgccgatcattgactacaaggccgctcaggacgagaacgtcgcccggatgaagtctgcgtacggccgcaagctccacggcgctgacaaggtcgtgctcgacggccgggcggacaagatgctggccgacgccttcgccaagacggcgacccaggccgtcgaggtctcgccgctggccaaggccgagaaggacgacgtcgatggcaacggcaagcgtccggccaacccattcgagctggcaaaggagaacgcggcaaagcggcgcaagacgaagggcgagtagggtcgggcgggccgatgcgatgcgcctttctgagctcgcgatcagagagcgaccgtcactcagtcctggctcttagccctgacccaccgcagtaagtttgcttctgctaggcgaatgctttgtgagggcgcagcccgtcagctcatgccattcttgccctcctgggaggcaagccaggcgcgcacgccttcgcgctcgctcatcgcccagaccctccgtagaccaccgtcccgctgactctcccagtggtgctcgaggatgccgacgatgacgaccatgtcgtcccaccggacgtcgaaaagctcccaccagcggtccggaagcggaattttctcttgccgagtcgcgtagaggagggcggcggcggctagtggcggaggcggaaagagagcagggagtgacgtctgcagcgagtcgttgagaaacccccaggcgtcgtcgacgacgccctcgcggtcgacgagaccgagcatctgggcgtacgggacgagggccgcgtacggatgctgaatctggacgttgaacgccagccgcttgagcacttgcatctcggcaacgacgagcgcctctttcagttcgtagaagcgagacgagtgatacgtctggggcgtgtagtcgaatggcggtcttggaggtggtgtcgagaggtgggtgatccgggcgagtaggagcgagaaggcgttggtgaggtcgcgctgcagagggggcggtagtttcagctctcagcgaccccgacagatcgcaaggctgccctcatcctacacaccagccgtagcggacattcctcgagcttcgtagcgaggtagagcgctcccatgccgacgtcctgcgcaagaagacgtcaaagacgtcagcgagcgcgcagctgggcgaccggggcagcaaaggaagcagagccgtacccggatgctgaactgccggagcgagctcacgaaccagaagcgttgaaagagcacctgggccgtcgccattgccacctgcggcctgcattgccagatcggggtcagctggcgcaagcttgaagaatgacaggctggactcacaattgggcaagcgtgccggcctcctggataagctgagcgccgaacgcccggagctctgcttcgagatctggcgggataccatcttgactcgacggtgtatgtcggagctgccgtggcgtcgccaggggcgttaaaatgagcgacatcggtccggcagcctgatgtggtcgggatgtagagagaggacgcgtccccaacgtcggcctggcccgctggccgcttgctcacctcgaccacgatctcgcccttcctcgtcgctcgccctctcgcacagacgatgaagcagccgcgatcgctctcctagacgatctctcaacttcggatggcttcccttttgcggctcagccggccgagccttgagcagttcgccggcatcatcgagcactcgcagccaacagtcctgctcggcctcctcgacaagtggcctgccctgggctcctggcaacgagcgaaggcctacggctcgctcagaactctgggcgagggtcgtctcgtcgacgtcgagtggagccggcgcggccgaggctttctcgatccgggcgagcgagggaagagtcggctgccgctcgatctgtacgtggacgccttcttgctcgagacgataccgggtggctcggcggccgacgacaccgtcttctacgtcgcccagcaggatctgctctctgatgtgagtagcggtcttcgctccagatgcctgcctcgactggactgaccagcacctcgtacccctcaagattcctggcttgcgcaaggagatcccggacccggccttcgagcccgactacctgacgcaaggcaagggcgagttctggcgggccaacatgtggatcggacccgagggaacattcacgccgtgtgtccttgcttcagcacctgtcggtcgccctgcttctgctgacacgtgctctcaccggcccgaagaatacatcttgacccctaccacaacatcttttcacagatcgccagcacaaagaccttcttcctctacccgccggcagtgccgaccgacggtctctacctcgctccggcgcctcagcatcagacgtcactcctgccagttgcgccccatctggccgatcttacggcgtttccaaagttcgcggccatccgcgagcaggaggtacgcgtcgtcctgcgcccgggcgagtccttgttcctgccaaagggctggtggcacgccgttctggccgaggacctcgtaacgaccgagaagccggccgacaacttgaaggttgaccgcgagggcaggatcagcgtcaacttctggttcctgtagccatccggcagaactggctctcaaagatcgggctctcggtcgaggactcgcagcggtcagtgctcgcagcggcgcgcgtgcgatcgatggccgtcgcaccaaagaggggcaaagggcaaatgcaaaggcatagcagaggcagcagaagcagagggattacaggaaaaacgcggtccaagatggtctacagcagggcaccgaagaaattaatgcagcgaccgaacgtcgagactcagcgtaagacgagagcaattagcgtcaaatggcgcggccagcctcccaccggctgcgctcgctcatctcgtggccctcgctcggcgcgcggatgtggccggcgttctcgctatcgcttggcgtccgcgcagccgtcagcggccggtcgtaatcgtcgagaggctgcgatgagtcgcgccggaacggaccagagccggggaggggctcgctgatcaatttgggcgtgccatgggccgatcggccgactgctggctgctgcgaggagagctgacggtcctgccgcttgagcagaagtaggccgaggaggtaggcgacgacaaagagctgaaggcgtatcgtacgaaaggtcagctggggaacgaaggtcgttttcaaaggaggctgcagtacgcacgccgagcaggacgccccagccggccttccagccgcgcgagaccggacccaggccgctccagatctcaaattcgccaaagccggtccaaacggcagcatagccgaggccgagcatggcgagaccgatgagggcgtgagcccagttctgaatcgcccgaccgccagaagcagagcgcttgggcaggacgtgaatctgcaggcagggacaatcgccagtaagcgggctgtcagagctccgagcggggaattgacgaacgagcgtgccgagtacgatctgcaggacggcgaggatgaagatggcgaggccgatctgacgatgagtcgagaaaaagtgacggccaatgtcggtcgcctgtcgttgtcaaacgtcgagctcggttagcaaagcgcctcgctgcagaagtcaccagttgcaggagagcacgcacgctgacaccgagggcaaaggcgatgaggatgaaggctcctccgaagccggcttgcaggatgtagtgcagccgaacccaccagcggaggtacgtgcgggcgaggcgaccgaccagctggcgtatcagaccaagcagcggcgtcagcgcgcatctccgagtgctctgcacgcgcggtagacgacgcaccactcccaaaggcaggataaccatcatgccgatgccgccaaagatggcgtgggcgacgatgatcttctgggacgaggtccagtcgctggccgacgtcgaggcgccgctgccggtgacgggcctcgttgcggtcgccgtcgggagcataccagtgccggctgcgggtagcaaagacacgcagcacatcagtcagtctgagcgccaaatatcgctgataagacgacaggacgcactgctggtaggccggcccgtgacaatgatggctgtcgtggctccggcggtgccgctagccgtgctgatgacggtcgtcaccgggtcggcaacatcgacctgcccgctgaggtcaagcgtcactgcgccggccgagctgtgctgccgaatgctggctcctgtgtcggccgtgttggggttggtcgaaccctgttgcaggaagggcgcgcagtcgcccggtcaagaggggtcagcctttagcgtgtgcgaatcgacgaggggtcgagagcgagagacacgcacataggcccagatgaggtcgacaggaccgggagcgctgttgtcgctgacgctgaaggagaagcgcgtgtaactgccgttgatggcgctgccgtcgccgacgaaggttgcctggatgctcgggttattcacgacggtcggctggacgttgccgctcgcctggcgctgcgacatgtgcagcgcgttctgatacggccaggcgatgaccattggcgagttggccattcggcgtccgaagccgctgtgagcgtgcgccggggaaggggagagagacaaggccgcagcgttgggcttcgggtcagcttgtttggcctcgaggtcgcgtcgaagacggtggagggcaggccgccctcctgtctccgtcggccaggggaggacgtgcgacgtacagcgagatccagccgaacccgggttcgctggcgatatcggcctcaggcctgctgagcgtgtctgtcaggggcgatgagggtggacgagaggatcgatcaacctcggtgacaaggcgagctgtttcaagcgacgcgcagggagcagcaacacgaggccgccgcggcccttcgagccgctctcgacaagctcagagagcggcagaggtagagacgcacacgtgacgagaccttcggtcttgatggccgtgcagcagactccctggagagagcggacgagcagacgcaaggtcagcctggcgaaaccggacgctgccggttggtcgagcctaagggagggacgagacctcgctgcagaagctgccgccttgcgccgtcgcagccagcgtcgtcggcactgcggcgagtgcaaaggcggcgagagcttgccggagtcggaccatggtgagttctatcgaggagagggtggctgggaggaggtgaggcggagacggaggcaagggtcgccgaagggcgcgaccgcccagccctcctcccccttttgaggtgctcccgacgaccgacggcgtcagtagagcgacctgttgttagattcgccctgcccgttggcctcgggcatcgatgccctcgacttgccctattctcgcgtcgttcgcactgccccgaccgccattcgttcccaggacgagaggcttggccggcccgtcatctcgccctccggtctcaccggcggccaagcatgcccggcgagggctgtcacgcagcttggctttgagtcgtgcgacgctggagccgggcgaagcactcggaccacacaggctgctgggccgctgtcctgccgatccgatactctaagaccaggtgacagtcacgacccacaggagattggcgcacttgcgcgccatgggatcgtcgtcaaagggggggttcgttaaggggaaaagggaggggcgggtatggtctatgacgggaaggggtgaattgagacgaacggtcccggctagtaagcgaaaccgccgcgctgcttcgacaggtcgtcctcgtcatacggcgacggggcgcggggagatgctttgggtgacgcgtcccaggcctggctgtcctcggccgtcgcccacgactgctgcgagtcttgcgaaggatccagggcatgcgtcgacgaggccgcccagagcgccgactggccgtagtcgccggccgacggaggatgcgagtcgtaagggtagctgccgtggccggcttgcggcggcggcgtcgactgcgcatagtggtactcgatcggcgggacgacgaccggctcctcgaggtcgccgcttgcggacgagaacgaatccttaagcggcgacttaacggccgcgaacgttggccgataggcagctcctccgtggtccgagtcgccagcctcggagacgaccgacgaccggagccgctgcgattggctcgcatgcaaggccgggtgcagctcgaggtcgaccggccggttcttgcgcttcctggaccggtgctcgatcccgagccgctccttgaggtcgccgccgacccaggcctcgcggatgatgcccttgtcgagcggccagaagaagcccttgagcgagcggaagaggtagtgcgggccgatcgagaggacgatgacaatgatgaccgttgcccaaaagttgaccgacggaaagaggatgacgacctcgtaatcgtagaagaacgtcgagaacatctgcgagggcgcacgcgcaaggtcaggctgagcgcaacggcgcatgcgtagcctctgagcaagtctctggacttacgctgtagattgcgacccagacaaagcagaggagggtcgaaacgatgatgacccaccaggtgatgacggtccagctgcaagggaggccagcgtcagtcggcggccgttgctttctcaagctaggccttgcgactcactagcgagagttgaggccgacaaagagattggccgtcgcgatagccgacacggcgaccgtcgtgccactgcgagcaacaaaggcatggtcagtggccgaagcaccagagcggggaactcgaaggcgactcacagctcgtacatcgagctcgtgtctagcccgttagaatccctggggacaaagggcggacactcgtcagcttcctgccagaaaagagaccggaccggatcgccacgcaccaggtccgaccgccggcgtaagcgaagtaggggatgaagaagcagacggcgctctggtagacgccgtcgacggtgtacatccagaattttgttcgcgtatactcgaggcccttgatgccgcgctcgtacagctgcgggaaggccagcagtgccgtcgcgttgacgtcttggtcgaaggcgccgagaacgatgacctggaagcgcagcaagcacagtcagcggtgagtgcggcgcacgtgagtcaacctggccagcactgaccggcagggacgtgaagatgaggttgtagagcaggatgaacgtgtactcgaagagatactgaggaggcagatgatgcgtcagtcggcagcgaccggtgagagcgaccgtcgcagaacgcgcgaggactcaccgtcgcctcccactcattaaagatgcagtaccaaaagagggtgcccgtccagacgaggtttttgtagaagaagttggcgtgcatcctgtagagagaagcgtcagcaatgcctcaatagaaacgcagctgaaagggcgacgcactcggcgacgcggacgtaagaccaatggccgtctgcaagcaaggtccgggtcagcacaagcaaaagtagcacggtcgcaacgcatcgactactcacggacaaggagcagacgctacgagatcggcagtcgctcaggttcagtaagcactcggcagagggtcaggcgggtgacgtcggcacactcaccgtcaggaaccggaactggccgaacgcatagtcggcactcatcgccgcttggctgccctcgtggccaaagagaccgacaccgatgttggcctcctggatcatggcgacctgcagaatgtccagaagcagcgagcagagaggtcagactgtgctcggatctgagtcgacgcttgcgagcagacctacgtcgttggctccgtcaccgatcgacagcgtctgcgcgacaaagaccaggagaaagaacagtctcagcaactccgacaggcagtcacgaacaaggctcgcacgcaccatggccttcatgccgaccttcacgagccggacggtggcggccttttgcgcaggctgtgaattgagggccagcgaagcgtcaggaccggccatcaaagcagcgcgcccgggcaagaaggacataccgaaactctgcagcagacgacagtctcacattgtgtcgacaggctgaggaagaggtccttgaggccactgtcgagcgcaaagcggagcgtgtcgccgtcgatgacgaccgcgaagctggtcgaggagggcgcggcgccggcgatcttttgcttgccgacggcaggaggcccgcgttcggacgcgatcttgttgagcgcaccctcgatctgtagacgtgcgccgtcctcggtctcggccgacaagatgaagatctccatctcgttcgtcaggaggttgcatgagtaggctggaagggagccaaggggacgtcagtgacgatcgatcgaagactcgttgcgcaagacgacctaccgatctcaatggccgtctgcaccttgtcgcccgtcagaatctgcgagtcgggcactcaatcagcctctggtcgtcggctagcactgacggccgatacgcacccagagcttgatgccagcctggtggagctgctcgatcgtgtctgggacgccggcctggagccggtcctcgagcgcggtcgcgccgaggatgatgaggtcctgctcgatcgtctcgcaggccttctccatctcctcatctcggtcgcgcagggcgctcgatgcggcgtcgtaagtccgagaccagtcaaaatactcctgctcgtcgaggtagcggtagcctacgaggagcgtccggagaccggcgttggccatcgtctcgaggtcatgctgggtagaggcgatgatcttctggtcgtggtccttgcgcaggcgggccatgatgaccgagtcggcgcccttcgagtacatgatgagccggccctcgggactgcggacgatgacgctcatgcgcttgcgcgtgctgttaaactcgagcacccgcagcggcgtccagcgctcggcctggccgaggacctcgatgtcaaggtggtggttgttcttgtggatgaaggtgaagccggcatctcgcgccgctccgacgagcgcggcctctgcaaggaagggagggccacagtcagcacagcagtgaacgaatggggacgaaggagaagacgcaccatcgggcgactcggccttgtagtcgatcaggaaggcgttgtccggatccctgtcggcgacgacgccgtggcagatggcgagcgcgcggaagaagtcgatgaccggcgtccgatgcgggcttgaccggtcggccagctgggcagcgaggtcgggcgcgatgagcgtcaccttgtcctcctgcagatagcggttcttccagccttttcgcatgcggtcgagcatgacgcggagcgactcggcctcgcgctccttctggacctccatatcgggcagctcgcgtccctcgcgcttggcagctccgagcatcgcctcggtgacaccctgcagcagaattggtcgacatgcagtcagcccccacctggaaagaacataagcagcggctgcgtacctcgccatacgtcacgccgttgaccgagcactttttgaagttcatctcgttcatagtgagcgtgccagtcttgtcggagaagatgtactcaatctggccgaggctgcaagaaatcaggtcgggagcaggacgtcagttgtcgagcggcgtgcgagagcaagaagacaaggaaagggcctcactcgtccgagactgcgcatcgtacaagaagggagagggtcaagcaggtgagcagaggcagccagctagagcactaagggtggactgactgttccaggtcttgggcacgcaaggcgtgtcgagctcctcgtagtacatctcgatgtcctggaagatgaagatggcttggatctgccgcggaggggcaagtaggccagatcagcaccggcggctgggattggatgacggcccagactgaccgtcttgacaatctcgatcgagatgtagagcgaaatcgggacgatattctgaaagacgatcaagccggagctgagtaatgtaggctggtcagcgaagcaggagagatggcaacacgaggaagaggcgcacgcaaagatgacgagcgcgttgacgacatagttgtttgagggctgcgagccctcctcaaagacgttgaagctgcggcccgtctggtgctcgacgatgccgtagccgacggcggttgcgacgcagaggcccatgaggatgatgaaattcatgatgacgttgaagttggtctcgacctcgatcttggagcgcttggactgaagggcgggaggcaggtcagcgactgagcgtcgggcaaacagccaagatgcgctaagaccgaccggcgtctcgccgccattcatcatgatcttggtgtcgcggccggtgaagaggacgaggccgatgatccagccgctgttgcggatcgtgcagccgcggaggagcagctcgttgatcgtgatgggctcaatcttgtccgtcgaagctgagccggtcgagacgagcgaagcctgggtcggtgctgctcgtagcggtccgccatcagacgacagctcgcggctcgagtacttgaggacggcgttgaaggtgtagaggttggccgtcggcggctcggcgtcgaccataaagcgggcgtgttcgacatcttcctccgagttgatgttggccgtgcccttgagcgacttgcgcaccttcaggttggtctcgccgtcaaggttcttcgtctcgacgtagcacacgccgtccgcgtcggccgtcgaaaggacggcaatgtcggccggcacctgctcgtcatcgcgcagcaagacaatgtcgccgacctcgagctttttccttcaaaggcaaaccgaggttttcatgttagtgacatccttagcggagctcaggtgaagttgggagacgacgtaccagagagtccgctcccatttggccgtccctgcgctcgagcggtcccaatcgacgacaccgatcgagcgtcggctcgggcccgaggtcacgatcgagggctggtaggatccgattgaagtcgaccggttgcggccgccttgaccgagatagccgaggtcggggtggttgcctcccagtcgaggttcagaagcctcgtgcgagtcgatctgcgagattcccggatgaccgagtcagtcttgcgcgtcttcacgagcacgatgccgccaaactgcggctcagcacgcaccgactggatgtcgtccatcgcatagctctggctccggtccgccgcaccgacaaactccttgtcatcgccgtcgtcctgggccggagccgtcttctggaggacgatctctttgccttgccgagcctccttctcgcgcagcttgcgcacgccctttgacgtcttgtcgtctgacgagtcaaagtaagcagcgggattagcgacagcatgagcgactatcgccgagctcatgacgtactcggattcgagtagcccagaaggcgttcgagcagggtccgcgggtcccgcggctggttgacgtttttccagccgccgagcttggtcgcggccgagttgttcacctgcatgggcggcgagcctgtcagcggtgaaaagaggctcaaggaacggcagatctagccttacctcctcgtccagcgacgctcgacggtagtcctcaatgccgtccttgatcgccgtcagcgtcaagatggcgacgagcggtagcatggcgatctcgggcgtggtcgcgccaaaaatcggaaagactgatcgtgacgagccagtggacaaaggtcagagcaggagcggtatgcgagagacagtgcgagagactgaccttggagaatgactaagagcaagaagtacatgttggcgaccctgtgggggggggggcgcagcagcgtcagcgacgggtgcaacagccggtcgagcgcgctctcacgcaccgcctaaactgctcgaaaatgatattcttcggcaggaacgtcaatatcgtgtacttgctcgtccggaccttattgcggctgaaacgggcgatcgggtcgtctttgtagagctcgcccggagggagcggctgcgcgcagagccgggcaggcaaacgtcagcctgaactctccgcgacggaccggccgggaacattcgcgcacccagttgacgtagacgttgcgccgtgcaccaataggctcagacccagaagccttaggctctagtgccgacggcggtgtgggcggctccgtctcgacgtcgccagctgtcggctgcgtcgtcgtcttgccgctgaagcgccgcttgcctgtcaagctcgaccgctttgtctcggggtctcggtcggtacgccgcccgaggcccaggaaacgtcttgtccggttcgcgcgctcctcgttatgaatcgagacggcgatggcggaagctagcagcggcggccggcagcgggcacagcgacgacgacagcaccgagcaaagcgtcaatctgctggtcgagaccagatgggtaccggcttgtccggaagactcacctgcagtgcggaccgtcctcagccggagctctgggtcgatcatctcatcctcctccatgtcgtcctcgcccggacgcagcatcgatgaccggcgcgagcgcgcctcgtcgggcccgagccgcgagtttcgccggctgccgaggccaatgctgttgtaagcgtttgaggacatgaccgagcaggggtcgctgatatcgttgaagagggtgcgatatgctgagaggccagctcgaccgccaggcgattcgaacgacgagcagtcgatgcgaggaggcgagctgcgaggagatgatggccggtagcgggagggacggccgggcgtcagcgttggccgatttttgagctgtagcgacagcaggcaggagagcaacgacaattgacctcgggtgacaggtggggaagtcggcaggggctaggacggcgtggcccaggcgaggtcggtcgagcgggctcagcggaaagaggagcgagggctgacagagggcgagctcgcgcgaccggcgcgcgtcgccgcgaagcgaacggaggaaggcaagcgaaaggacgaggtcggtcacccgctttgggtcggcgctgcttcggtcggaggcgatgggcgtagacgaaggttagaacgaagcagtcgaccgacacgtccaaagcggaagagggatcgtgaaagggggggctcgttagtcgggacgcaggggaggccgcgcctcggcgggagcggcggtcagcttcaggaatttcgccctgctgcgcgcgacctctcggcaagaagccggcgccggcggccgacggtgcgtacgagtctcctgcacgggagacctcgagaagcgaagggagagctgagctttgctcggaggcgtacgggagtggcatgagatcgcgactgtcctgacttgttaccagctcgcggcccagtctgctctgcgatccggcgtcctgctgacgagagcatcactgacgccgagcagacttgggccagaccgggcacaagcagagcaagagaagtgcgtacgcctgaatgcatgcaattggacgccagacggagggtctccatacgtctgatacgaacgctcgccggcagtgccgagccgataagcaacgcatgcagtttgcccagagatggctgcggtgcattcgacttgagtgcggtgagagggctttgtcctcctggagcctgccaaggttgaggcagctggtcgcagaatgcggtcaatgacggccgaggtccgtcttgtcatggccggcgaggtgcttggcatggctcggtcgtggaccaaggccgtcgaccgaggcgagtagggctgcagcagcagggcggctcaactccccttgccggtcatgccgagagcgctccggagccactccttgcggccgatacgctcggctcccacaagcaggtccttcgtgtcgtcgacctcttggaggccgggcgcgccgtcattgagccgtgcgacgtgcgcagccgacgtcgccttcttgggggaaggcgacgctgatgagaccgagggcgtgtcaagcgaggccgaagcgagatgatgaaactcgaggtatttgagacctaggaggataggcagtgtcagcagaggtcaaaggattggggcttgggcgaaaggcggccgcacctctgacagcctcgagaaaccgggcgagcgactccctaccctcgacctcatagagcagcagacctggccgaccagctttggcaagcccagagacgccgtgatcgagcgcgaagcccttaacttttttgaacttggacatggaccggatgtctgccgtcgcaagggaggtgagcgctcggatgtcagcgctgcgtgcgacgccgggaggggagctaggtctgggcgcacgatgcatcttcgagacgcagatgaggagctccttcgtcatgtcgcccgtcaactccacctcgcctgggcggatagcgcgggttcctccgttgaccgacgggccgtcgtacgaggagcgggtcgaggcgaccgaggcggcgggcaagaaagccggtgccgcgtcttgcaactgctggacaaagtcgagcacgagcgtcgtcggctcgtcgtctgttgatggtgccgtctggagcgagagcttgctcgtcaggcgctcaaaggcagcgttctgaagccaggccggctgggtgagggtgacggtcggcggtggcgctcgcgaggcctgcccctcttcccgagaggagccgccggggccgatgacctcggctcgatccgatgtcaaggggaaggcgatctccaattcggcagcgtgctcttcgtcgaggtcgagccggagccggagcacgagctggtcctcgggctcatcggcggtcgagctgtcggccgcgatcttttgcaagcggtcgacgagggcgcgcggaacgacgagctcgtccgggagagggtagagcgcattcagaagctcgaccgcctcgagcacgctagcgagcgcgtctgccgagagcggcctccgggtaccgtcgacggcagggctcgactgcatgcagctccgaaagatggtggcgagcaaccggtggcgatggcagtttcctcctcggcagcaggcaccaagctgccgccggcgctcgccgaacacgaaacgtcggacgcgtagccctgccttctcctcgcatgcgcccaccatcgcacctcgtccctcgcctcgaccgcctcgctcgcctaccaatctgctcccagctgcccctctcgctcgccctcgccagattccagcccgtctgctgccgttcaattagctcgcatggtcgccaccgctcaaccgatgcgcaaggccgccttcggctcttggtcgtcgcccatcaccagcgactttatcgtcgccagcgccgtctcctttgcagagactgccgtgactgacaagtacctcgtacgtgcttctttattgtggggcgtgattcaggaggccagagagctgacaggcagggccggcactcgcagtatcactcggaggctcgacccttcgagggcggtcgcgtcgccatcgtccggaccccggccgacaagagcgggcctggcaaagacgtctttggcgccgactggaatgctcgtacgtcgcatctgtcgtggccgaaagggtcctatgggcccggccaggtccggtcaaagggtcctggccgggccccctctggtcggcccagcgtggactcgagactgacgccttgcctgacttgctcgtcgccatccagggtctcgagtgcacgagtatggcggcggtgcttttacttgctcccctcaggacgaggtcatcttctcgcacatgaaggacggtcggctttaccgcgttgcgctcggcagcaccgagccgacgccaatcacgcccgaggccccgacgttgcgatacgccaacatgcagctgcaccctcgcttctcgacgacgcaccccttcctgctcgccgtcgacgagtgccacgtcgacccgaccaaggcctccggcatcctcaaccggctcgtcctcatcgacgcgtcctccggcgaggtgacgatcctccgcgagggctccgacttctatcattcgccgaggttctcgccggacgggagcgccgccgcctggtacgagtggcagcaccccaacatgccctgggagtcgtcgtcgctcttctttggccggctcgacgacaaagcgcttgtcgacgtcgtccacgtcgccggcggaccgacggccgatggctcggacgagagctccgtctgccagccccagttctcggccgacgggtcgacgctcttcttcatctcggacaagacgggctacaacctcctctaccgctggcaagcggcgggcggcgccagtcctgagctcgcgatggaggagctcaaggccgacctcgctggtggcgactgggtctttggcaactcgcgctacgtcctgctcgatgactcgaccgcgctcatcacgccgtcgatcaagtcggtcgcaacgccgctccttctcaacctcgacgacaagacgacgacggcagtctacccgaagtcgaagggcgacccgctcgtcgtcatcgagaacatgcgggccttctcgccgacgcaggtgctgctgacgggcacgtcaagcgcctcgccctcggctctcatcttgctgacggtctcgcgcgctggaggcagcaactggtacatcatcaaggattcgctcatgatcccccgcggctcgcttccagacggcatcttcagccacggccggggcctcgagtttgacgttcccggcgccggcagcgacgagggcaagcaggtcaacctgaacgtcatctactacccgccccagaacccgcactatgagcccaaagacgacagcgagcggccgccagcggtcgtgcggatccacggcgggccgaccgcgcaagccctgccagtgcgtgtggctaagttgtcgcccctcctggtttgaccttcgactgacaaaacctcgtcgtctctctacctagggtcttgcctggcccatacagtactacacatctcgaggctacgccgtcctcgacgtcaactacggtggcagctccggctatggccgcgactaccggaaccggctgcgcggcagctggggcatcgtcgacgtaagtagcattgctcgcagtcgccctggtatgcccactcggtcgctgctgacggtccccgtaaaaggtgagcgactcggtcgaagccgtcaaacattgcgccaaggagggcctcatcgacggcaagcgggtcgccatcactggcggctcggccggcggttacactgtgctcgcaagtctagcgcacagcgacgtctggtcggccggcatctcgtcctatggcattggcgacctcaagctcctggcgtacgtccgaccgggatctggtcggggtcgtcgttctcgctgacgagaaggccctctgcggcagcgacggcacacacaagttcgagtcggagtacctcttccgcttgggtacgtttcctcccggcagacatccacctctcagcacaactgacttctggccttttcagtcggaggcacgccagccgaggttgcagacgtctaccgggaccggtcgccggtcaactcggccgagaagatcaccgcgccaacgctgctgctccagggcctcgaggataaggtcgtcccaccggatcaggccgcgacaatggccaagaaaatcgagtcggtcggtggcaaggtcgaggtcgtctactacgagggtgaggtcttgaaaggtcaaacgcagctttcgattgagaaactgacacagctttcgcacgcaggcgaggggcacggcttccgccaggccaagaatatcaaggacgccctcgaccggagcagagccttccttgagacgacctggggcatcgagcccgcgtaggccgacgctgcttgatgagatgcccttgcgtgaacctacgtcaacgttctgagaacgtcgagagccagcttgcgacccccgttcggtcgcagactgaacgactgccgtgggttgcgcttctcctgcacccctgctgaggagacagacatcgctgtcgccaaccgccagctcgtcggtcccgccctcacgcccgccgccacccagttctcgccgttcgcgatcgaacttgccgtttgctgcgccactgccggcgaagctcgcctttctgccaacctcacgtttgccatgtcgtctcgtcccctgagacctcccaggcttgtcggcaagagcgaaagtggaacacggcctggtgaggatcgcgaggaaagtgcgaccggtcgcgcgcgaacgcacggcctgacttgtgcgcctgcaggacgagtctcaccggtcgcggtcgacagcgctgcgtccctcacccgaccctactgcacctgcggtgcaaaacaaaatgttaagtccaaagattggcttccgaataaattcggtcgcacggtcatttttaggttgcaaacagcaaatattctctctccgcaggtgcgtcactgagtagaatgtaacccctgcacatgaatataaggcgggctttcagagagagggcagaaggtgcaactgcgccgaatcctctagagaccgccgccggccggccgcacgcaccgccctcgccttgcccgaggccgccgccctcgcccgacctccgaccacgaccctccttcgcagcatcctcaccgcccgaccatcgcagtcctggccacagcatggaccgctagatcgcgtgacatctctgatctatcgccgtagccctaacacctcggcatggccgaccacgccgtcaaggcgaacgcccggtcgtcccgggtccgtctcgcccatctccgctgctccggtttggagacgcgcacgcaccccctctgctgacgcccagccgcccgtgctcttgccaggcctacaccaaggaggccaaggtcggcgagggaacgtatgctaccgtctaccgcggtgggtcctggggacgcgggccgaactctgtgacctcgagggctgatagtcgacctcgttctgcccttgtatacgtttacaggcaaggaggtggccactggacgagacattgccatcaaaaagatcaagatcggccagttcaaggacgggcttgacatgtcagctatccgcgagatcaagtttctgcgcgagctccggcacgacaacgtgatcgaggtgcgtcttgccccggcagcttcgccagccagctgcgcctcccacctccaaccgccttctgacccgcctcaactgcctcggcagctcctgtcggtcttctccaacaaacgcaatctcaaccttgtgctcgagtttttggcgaccgacctcgagtatgtcatccgcgacaagaccctcatcttcatgccggccgacgtcaagagctggatggcgatgacggttcgcgggctcgacttcatccacaagaatggcgtcctgcatcgggtgcgtctctcccatgacatgtaatctcgggctgctgctgacctctgtgccatgcgtgtctcctctgcaggacctgaagccgaataacttgctcatctcggcggcgggcgtcctcaagattgccgatttcggtctcgcgcgcgagtacggcgacggcacaggcaagatgacttgccaggtcattacccggtacgtcctcacgtcgcgctggatgtcgcatagctctgctgacgaaagctcaatcttggcaatagatggtaccgaccgccggagcttctgtttggggcgcgcgcctactcgtctgcggtcgacatgtggtccgtcggctgcatcttcgccgagctcatgctgcgcgtgcccttcctctcgggcgagtcggacctcgatcagctcaagaagacgtggagcgcgatgggcagcccgacagaggatgactggccggtcagtgcaccctccacggcgacgctcgcccctcttggctcaatggcctgcagctgaccgagtcgcccacctcctccagggccacaagtctctacctgactatgtgccgctgcccgaggtgccgaagcagccctggcacctgcacttctcggccgcaacgcccgatgctgtcgacttcatcaggggcctgctcgtctttgatcctctgaagcggctgtctgcggccgaggtgcgtcgccggtcgcttctctcgctcggccttacctcccgctgacatgaccccttctcgcacttcgaccctctcccgcaggctctcaagcacaagtacttctctgcgttgccttacccgacggtcccggcccaactgccactgccgacctcacaggtgacgcgcgtgctggcgcccgaactcgagcagaagcagcctcggccgcagggcaagcgagccgacggcgcaggaggcgtagcagacggcgcgaggaagcgcaagagcaccggcgagcccggcgacgaggagaacgacccggccgcgagtcggcgcgtcgctcgtaagctcgactttggggcgtgaggctgccagtttaggtgatcggtccccgagagaggacgctgctctcggaagataccatgttgtgcatcactgtttcgcggtgagggtccctcactgagaaagcgttttgggttgaatgcacccacgcgactataaaattcatgattccatcgtgctgactgtgaactgccaatgatagctttcatcggcagccggattatgaagtcgattcataggtggtttcacaggcgcttcgctgaaaggtcagtgacttccattatgatgctgatccgagctcgatcagggctcggaaggtgcggcggcagcgaccggagtctgaatgtcttcgtcggctgccggtcagctggccctcccatcccccgcactcgcgtcgcgctcgagcctttcgtccctggctctcaccagcgcacggacttgcgcgtgaccggccctggctcgttcggcggtcctgtctccgagtacgacgttgccgtcgtgtctgcggcgaccctcgctggccgtgatccgatcggctctgccgaccttgccggccttccgtcgtcgctgctgcctgctggtctctctgctgacgctgcgccgcgtactgcttgcgcctctggttctctcctcaaccaactcacttcaaccgagaaccagaagcgctcaaagtacgacggccggacgtcgtctcccttccacccgattgtcatctcgaccggtggaactctttctccttcgactgttgccctcttcgctcactggcggggccttatgccccgctatggtctcttctctcgcctcctctccctctctctgctccgtgcccgtgctcgcttcttcgccttttaggcgaagccccttagccacttgaactccttctcgcctccaatgtaccaccgtccatagcgcctctgaccctctgctctcatcgcatgcccagttaaaccctaacccacccctttcttccctctcgtcctctctaccgccggcaccctctcccccgcctctgtccccctcttcgaccactggcgcgcgctcatgccgtcgtacggtctcttctcccgcctcctctctctctcacttcttcgggcgcgtgctcgcttctttgccttctaagttgcgctcccttcctctgcctccgtctcctcccctcgtccagctctcgagctcctcgcctcccgtctatagacccgcctttgtcattgcatgcccgtcacaccctaaaagcgccgtcagagacagggttgctctttaaggcagacaggaggctcggttcgaggctaggccgacgcgtacaggcggatggccgaactcgatgacacagacctgaatgatgaccgcgcaccgattatcaggttgcgggcaagttccactcgggacccctgccgagatgcgttggtcagtgtggagcgcgtcaaatgatcgaaggcttgtcggtggaggcaggtacgtcgacgcaattgtggttgacatgtgggcgagcccgaccggccgccgctggcacgcgaagaaacgagctctgcaggttgacgtgcagttttccttcggccggttccgaaggcagcgccaagagcggccgctcctgccctgctcagccctcccttgctcccgaccacatctctcatcctaatcggccatgtcgtgatacatcaacgtctccttcttcggcttgctctccatcaacgtcttggccggcgtgcagtcaggcgccttcgccgcccagtgcgggcgacaagctcagccagtccgcaacattgacacgtcttcggcgaccgacgacgactcgtcatcatggccaggcgcgacaccaccggaaccctacgaccagctgagtgtaacagcacgcatggtcatcctaacgctcacctgctacgccggtgcggtcgagtcgtacaactttagcttgaagtaggacggctcctcggcggctcggccacagtcatccccgagccctgggcgtcggccctctccttcttctgacgctgtcgctccgaatcaaagccctcgtcgttcgccctactcacgcctcaggccgtgcattcgccccgttcgctctcagcttcctttcacctgccgaacctgagcccggctcgtctcttcagcgctagctcatcgcttgctccctgatttgctctgctttaggtttctctcgattgcctcctcttgctgtgggccccaggccctgctgatctacctgctgacttttgtacgagggcgtgcactgaaggctcgggagggattgggagggggagcacgaagccacagccacggccgatccgggagggacagccaggtcaaagctgtcccggcggcaccagccttaggtcgatgtctgaccaagcatcgacagtcccggcggcccctccaacgccttgtccgcaagggaacggcatacaagagggcgcacagagcgcgacggcgagaagggcacggagccaggccgtgatagcagcctgcgagacgacagcgaagggcgggccaaagagaccagcggggcaagcaaaagaagggcgcccgactcagttgcgattccgtttgcgccggtcggcctgcgacgatgcttcgcgtgctgccggcctgcggtagagagctggggcgtcagtgacctgttcagcatgactccagctgggacgactcacttcttccccttcggcttgccagacccttcctcgcgatggaagccgagcccctcctgcccggcctgcgcctgcggcgggataacgctccccgtcggccctttggccgcctctgcgagcgctccgtcctttgcgacctggtaggcgagcagctggctctgatgctcgccggccgacgactgggcgagcgtgatggtcgccgaaaggttgttgacgagcgtctgctggatgttggccctacaggaggggcggaataatgtccgagtcagcgagagaagcgagactacgacagattcgtcaaaactgcaccagtctgagagctgtcgaccgacgtcgacaagtgcctggtcagataggtcgcgcccgacgacctcgtcaacgaggaacgactgccgctgctggtccatcttgccccggatcgcctggagaaaaacggcctcgatcaggagatcctcgagcgcccggacgccggcaatatcaagcgtcgtcaggagcgtctcgtatgggagcgtctatgcgagagacgggcaaacggcggggtcagagaagtacttcgacgagcgcaagcgagtggagcaacagaggacgcacccgcgagatagcgccaagcgagacgatcgagagctgcttcagcttcgtgatctgctgggcgttcagcggcgggtatctgcccggcgaggctgtagttgcgcggcagaagggggagcggtcagtgcgctgcgcgtgacgggccagcagccagagcagacggacagcagtagctctcaaacgtgccgtacgcgaagagctggagcagagtaaaccaaggagcgtgcgtctcgtgcgaggcgagctgtgggtcgatagcgaagcgggcgaggaagtcagtctcgtttggccaggtggaggggcggtcggagcgcgtgacgcacctcctgaacgctaggcagctggagaagctcggcaaagacgaaaacccccggctgaagcggcaaaggatgcagggagctcgttgatcagccgctagaaggcatcaggaaggcgcgagcaggggcagcgcgtgaagaggggacgcacggcggcggtcgcctgctcgatggccttggccgtcgcggcgcctcgcgagcctttggcgacgaggacgaacggctcgagcttggcctacaaggtggcaacatacaaagatgagcttccataaacggtaggtgaacgtaagagctcgcttcggtcgacgcacggcggcctgagcatccatggtcgttggcgagctgttgaggagggtgaggtggtagaggaagacgatctgagcggagagggtgtctgctggcaagcgttcgacgtcagagtcgagctgcagaaagttctcgtgattatcccaccggcgccgggacagacctgagctcgatgctgttgtggctggaggagatggcgctggtggtgaggcaggagaaggaggtctgggatggccagctgccagagcctggcgctcgacctcctcgttcgagcctgccatccaccttcctcgcgcgggcggcgggcaaaaaagacgaagccggcagcctgctcctttgtccctccatccatcccttcttcaacccggtttgctgtcctaccctcagtagcctctttaaagagtgcgtcctgtgcccatctgtggcaacaaagcagcctccggctgacttgctgctcttgtagacttcaaaatggcccctaagtccgccgtcgcctccaagaccgtcttcaaggttgactactcgaagcccgtcgccgactcgatcttcgacggtgcgcctctcgtgctcgccttgttgacgttttgagcactcagttagctaacagacctgccgcccgcttcagccgctgagtacgagaagtacctccacgaccgcatcaaggtcgacggcaagaccggccagctcggcgaggccattacgctcaagcgcgaggccaccaagctcacgatcacgtcgacgatccccttctcgaagcgctacgtcaagtacttgaccaagaagtacctccagaagaacgtcggcggcggcttcatgcgcgtcgttgcgacctcgaaggacactttcaccctcacctacccccacgtcgctgacgagggtgaggccgaggccgacgagtaaatcctaccggcgctcgtcgttcgctcagcgcgcgtgccgcctttgttggctggtgcgcgccccgaccgaaccccaccggacttgggaaaggagcggacgtcctggacccggcagctcttgcctggaaatgcatgtcgcccttttctccttgctccttcgctgcccgggcagccctgggcgtgctctagtgaaaagccttcgtgtgctggcttgactgtgtcaggggccgtcgggccgaccgttagagctttcgacggaaagacgaagcggcttgagacgaagcggcgcaagctcagatcgcatccagtacctccagcattgcccgttccctctcctctcttgccgcctccagacttgcgtctgcgccacccacggccctgaccccggacgacccggtttgcctgccgtcctcgctagcctcagtgccagcgctgaggttgagcacggcccgctcgagcgcccggcgtcggtcaacgagcgctgcctttgttgtcgccaatgatgatgatgatgatgatgatactcccgctgccgtcgatgaggaaattggtgggggtggggcgcggacggcttcgagtgtcgctcggagctcggcgcagcggctgtccgtgcgaggtgggcgcaagtaacggaggaaggaggggagtgcgagaggaccagagggcagttgggtcagcagaaggtcacccagctaaaaggacaggcgccagcaggagcgaccactgtgataccaggcacgctacgcgccgccatccccgaagacgacgagacgtggcgtgtaaggcaaggccggcggagagagacgcacctcgccaacacccgcgtttccgctcgcctgcgggcaatctgtgcctcaagcagcccctcaagcgttgctttggcctgcgtggagaggcaagcggtagagtctggcagcgtcagcaaccaattggcccggctaacgtcgtcgtcacgaccgtctcgagtcaggacttacctgctcgcccctgagctcgtttaccctgacgagcatgttcaccccgacctccgccagccgtccgacttcggcgacgcccggccgccaggcgtccacctcctcttggctcgtcggtaacggtagcggcggccggccgagcgcacgaacgagagccgagaaggtcgtcaggtaggcgaggagcaggcggcgaagcgcctcggccggcgagggggccggaggggcagatgccgcgccgtccacactactgtgcggatggggtggcggcatcaggtccgtgacgcccatctcggtcaccgtcgggacgtgcgtcgggatctgacgagagaggccaagagcgagagctcagcgttagcaacctcgccggctcccatcgcgatgccgcccgagcataccggatagaagtcgccaaagacctcgaacccgccggcctgctcgatccagtcgagcctcggcggctcgagctggccgacgagtcgctcctcgtcgtccgtcggcgctctggcccgcgaagaggtaccgtcgccgctcgcgcgaccgccctcgtcctggagccgctcgaggagggcgaggttggccggcgtgaagagaccatggtgcgctggcggaggagggaaagtcgccgagagcgagagagcgggctggtcgtccatcgtctcctgtggtcgttgctgagaacacgaggcaagatggccgagcaggtcgaagtcgaacgtcgaacgttgaggcggcgcaggggcctagcctggcaacaatcaactgcggaggtctaagcctggcgcccgtgccacaccttcgggcctcgctcggtcagcgagagggtcgccgcctgcgcccacccatccacccaccccgctcgtcccctccgtcgtcagcccatcctccaatccctctctcaagatggccgcagcaggagccaacccgctggcagacatcgtccgtccttcccttcacctctgttgcgcccaggagcgcgagccggccctttacggctctctcacactcgctcgccgcatcagtcagcgcggaacccgtagacccggcccgaccgactgactcgaaaccttctcccacccctcgtctgcttgtcgactgctcatctgtccacgatatcacgacccacctcctcaccactccgctcgcaacggcctgcctcaggactggaactcgcccgacattaacgccctcctctcgaacctgtttggcgccggcggccctcctccagcgacggcctccactccaacctcggccgcgctgccgaccaccgccgccggcttacacggtgacacaatcgcgtcgtccgtcttcctgccgtcgttcagcggcatgtccaaggtcgtctcctcctcggccgcgtttcagccgagcatgacagggagtgcccttcgctcgctctcgcctgacgaggcctcccactcgtcctcgtcctcgtccgacgaggccggcggcagcggcgcgagcagcaagaagaaggcctcgggcagccggcaaacgaccaagcgcaagtcaaagggctcggcctcaggacctggcgcggcgggcacgcatggcccgaccggcgtcgagggcaagaagggccggacggcgagcggttcagccaccgctggccggcccggcgccttggcagaggacggcgacgaggagggcaagacgggaaggaagagcagtggcgaagcaaaggtgcgtcgtccgcttgtcccgggcgcatattcctgtcatagctgggcgtgctgacctcgtccttgacccccacgtcactcgttccctcgcacgtattcgcttccaccaggacgactcgaagctcaagaagcgcaaggagcagaaccgagcggcccagcgagcgttccgcgagcgcaaagaaaagcacgtcaaggatgtacgtgctgcgccccctctcccaagactgcgcccgcctccccgagagaatctgttactgacgcacgtgctgcgacccctttttcacagctcgaggacaaggtggctgagctcgcagcacagagcgagggccaaaagagcgaaaacgagaacttgcgcgaccttctctcgcggctgcagaaggagaacgtcatggttcgtcgccactctgtcaatcattggcgcgcgctgcagctgacgcgcccggttaatccacttgcagctcaagcagcaggcgttcaccttctcgctaccctctggtctcgctggatcggttccgtccaatgcgactaagccaccctcgccgccgtcgtcgctgaaggactcgtcctacggcggcacgtcctcggcctcgggcgcgtcgagctcagcctctccccagtcgaccgtctcgtcggccgactcgccggcacttcagccaatccagcgcaagccgcggcagcaacagccatcgacgatgccgcccccgtcgacgacggcctggtcgtttggctcaacgccgtcatcgtccgactcgccgacgtcgctcttcggtatgctcaccggcccagatacgcccccgacggccggcagcagcaccggcgccggcttttcttcgaccggcttcaacgcctttaccgcgccgacggcggccgacctccgcatgccatcaacaggcggcccgtcgggccagcagcagcagcaggcgctgaatgcgccctcgcccgtcgcgtttgccttctcgccgggggacttcttcccctctgcctcgtcgccatcggcgagcggcatgaacggcaatgggagcacgacgctccagcaggcgagcccttatcaggtcttggcgtcgaacccgctcttcacgtcgttcaattcgggcgcctatgccctctcgccgggtggcggcgctggtggtgtcgcctcaccgccgtcgagccagcttgccgacctctttccgaacggctttgacgacttcctccgctactcgtccggccttgcgcccggcagcagcagcggcgctggcggcggcataggcttgacgccgggtgccgacgccgtcatgagccccgacattctctcgctgcttaactatcctgcgtcggaatcctcgacctcgctgtacccggtagcctccaccgcaacagcggccagcacgacgacgaccggcggctcgcctgacagcgcgctgacgacaccgccctcgtcgaccggtcactcgccaaaccacggcgggtgccctggctcagccgccgactttgtcgcgctcgccgccagccggccggatacgacgtttggcggcgcggccgacgacgaccaggacgacccgatggcagccgccgcccgtgccgtgacggctgagtcgctcgcggccgtcggcaacacctgttctgaccaaaacgtgctcgcaaaaaacccgacctacgtcccaacctgggcgcggcgcgacgtcgaggagcgcgacgccttcttctcgggccagaaccacatcatgctctcggccgatccggccgcgaagaacgtcaagcttcatcagctctgggagcagatcacggcgacacccggctacacgccagagtcgtttgacctcgacggcctctgccgcgagatgcgctgcaaagcaaagtgtgacggctcgggcccggtcctcgaggagcgtgaggcccagcagatcctcgaggaggtgccgtaccggatccggacgaacccgatgttcggccagtggccgagcaagacggacgcctgatgctccgctcgcctccttgcccgcaccgcttgctcctcgtttcccctcgtgttgtatcaagagtgtcctgccagcccatcgcatgccccatgctgcatgccggatcttcaccccctttcgtctttctttgcgccacagccacgcacctatggccttccaccgtttctttgatcctcccattcccttcttcgcccgcctctcaatcctcgtgtacttccctgcccttcttctatgagcccctcactagaccatcaggcgcagagaaagcagagcaggtccatgaaatttggccgttcccccgcttcgctccggcgcggcggcagaccgtcgctgttttgatcaacggggcgtcgggcttagtactgcgggagaagagacgagggtctgtcagcaacaggtcgttacggacgatcaggcggagcgacgcacgacgtaggggatgatcttccaggggacgagcttgcaatactgaagagtcgagagatggcgtcaataaccggcaggagcgtaaaagaggaggtcggtctgcgcaccgtctcccagtcgtcgccgtacttgaccttgcaggcctcgtcgtcgcgcgactggcggtggacgaggaggatcataaagtagatgatgtagaagtatggcaggggcgagtcgaagccgcagggcaggcaccaggcgcagctgggggaaggcgagaaggaagggtcagcaagtgccagctcaaacgtcagcaaaggatgacgcacgccatgatgagatcgccaaagtagttggggtggcgcgagaagccccaccagcccgaggtgagaagcttggttccgcgcttggtctgcattgacgtcaggttcttcgggttcttgccgtttcggaagtcgttcttctcgccgttcgaggcgcggaagatgtagtagccgacggcctggacggcgagaacgccggcgatggcctcggtcgagaggtgggtcgggtggaaggcgaggtagcgggcctggagcgtgtaggtgaagggcacccagcaaaggtcgccgatcgagagcatgtagccaaagccgtcggtgacaatgtccatcgtcgtgaacagggccgactaggggagaggagcgtccgtcagttcgaccgggccttgtcgaaagcagatgcggctgctgacggacctcgttgtaaagcgcgtcgacgacatagtgcgcgtggaaaaccaggacgaggaccatcgaggccgtcacgtggccaccaagccggcaccactgctcgcaggccatcgagatgtcgacgaggacccagaggatgaggcccggccggagctcgttgaacgacttgatgtcgaacgtgccgatcgacgggttgagctcgcggcccatccagaactaaaaggcgaccaagcagctggtcagggtaaagtaaacagctgaaggcagacggagccacggacggccaacgcacgtcgtaccagaagctgcccgagttgccgacgagcgaaagcagcttgccctcggtgccgtcgtagctccgggcaaagacgtacacggcctgggcgatcgacatggcgagcgacgccgtgatgaggccggtgtagtggtcatagaggaaggtgaacgactcgggcccgttggtgatgatgtggccggtgacgaggccgagggcgagcagcatagtcgagaaggctgccgaaggcgacaaggaggcgaggtcagcagaagcagcgggctggcaagcgcgggctgaggatgagcgcaccgttgatcttgtacagcttgcgtgtgccgtcccggagctcggtctacaagagaggcagcgcgtcagccgtgtcggcctcgtcgagccgcaagagggtagcggcccgttgttgaacgagaagcgcgactcacgccctcgacccagtcgccaggcaggagcgcccaagcagccacgcagaaggcgtaccaagcgaggtacgccgctgccgcctttgcgtcccagagctggccgatccactcgccggcgagcagccggtcgacgacgtgcgagaacgagcgcgggagggcgccgcgggtcgcttcagcgcagccaaagttgaggccgtagacggtgagcggcgtcaggaagacgaggagcggcgtgagcaggtggccgccgaactgcgaagagagagaggaagacgggtcagcctagtgcctccgatttgaccttcaggcgacgccgcggacacaaggcttatgcgaccggcgaggtggaacgaggcacaggtggttcgacgcctgccagctcgccccagctgcaatacttagacgaaggagaacgcacctcgagcgcatgttttgacgtcttgggattgagggtctgggtcgccatcttgcaggtgaaggaagacgggagagtgatggtcgagagcgaaagaccatgagcggctgggcggaaggtggcacgacgacgcgcctgctgggcgcgcgcgagacgactgttgcgtagtagtcggcggccgaagtcaggagaccgagcgacaggagcaaggtcgccctcgcaacgtcctttgcctcagtcgaacctagcacaatggtcagacagacattgcaatgctgtctttccttgagtaccttgagctgctcggcgttggaaaggtggcttgtgaggacattgggtcagccgggcgagctcgctgcgcgacccagacgtgaccccgacagcaacagcttgcagcgccttgctcgaccatggcatgaccttcggtctagggcggtcgtcagctggacgatcagcttgagaacctgttcctgctcttgagctaggcggcgatggccttggtcgtgaccgaggcttgtcatgaacctccgtgacccgaccgtcttgctacagcccgatggccagcagctcgcagctcgcgcccccctctcccgcgctgaccgagccgacccacgttaccgacgacggccaccttcgactcgacccttcaacgacgttctccttctccaccacacccacctcccttactcccctcctgcttcttcaaagatactttccccgtccaacctcctcgcggccgacgacccggcctcgcggccgcctccaatcaccctcccccaggcctccctcgcacccccgttcgcggccgtcgccggccagcaggctttctcgcacccgctcctctcgccgagcgccctctcgccgcccatcccttcgatctcaagcagcagccggtccgagggccgctttcattggggacccatcgtccctggcgctgaggcgagtggcagctgcggtggcttccggtcggctgtgccgtccgactgcggggcgagctcgaccgcggtcgacgacgatgaggagggcgacgtcgacgacgaaggtgacgaggccgacgacgccttctcgtccgacggcggcgaccatctcgactatgacgagcagcgccagccggcgatcccgctgacaccgttccgcaacaaggtcggcggccactcgctcatgtggaagttcaagaaccgggccatctgcaaggtgcgtcgcggtgattctcgcagctagtccttctcattggcgtgctcttgctgactgccgtctcttggctggttcagccgctgatcgcccgggagaacgccatctacgaggcgtttgagctcgaggcgcccgagctgctcgcgttcgtcccgcgttatctcggagtcatgctcgtcaactaccggcgccagccccgaacctactcgccaaacctaacgacagacgctctcggtccgccgtcgccaggcgacctgcccctagtcgagacgtacgaggacatccccgaggtctcgctcgagtggaaccggcacctcgtgtccgaatggcttcagcggacgggcgtcaagcgcgtccggggcggcggccacgcaggctcatcgacgacccggcgcgccggcaagtcacgccggctctcgtcgctcagcagctgcagtacgcctagcgccgtcgagacgccgccgccggcgattgtcgccgagcagcccgacctctcgcgccaggcgcacttcgtcctgctcgaggacttgacgggcaacatgacgaggccttgcgtgctcgacctcaagatgggcacgcgccagtatggcctcgacgcgacgccctacaaggctgagagccagcggaagaagattgacaactcaacgagccgtgcgctcggcgtccgcatctgcggcatgcaggtcggtctaatgtcgtacgtaggtctctgagttcctagctgattgtcctcgtcatcgcgactgtgctaggtctgggacagctccgccaaccgcttcacaacgcagtccaagatgattggccgtaagattaaggtcgatgacttcaatgacgccctctcggccttcatctgcgacggcgagcgcctactcgtctaccacattccgcgaatcctccgcaagctctggcagcttgcgtctatcatccacaagctcgacggcttccgcttctacggttgctcgctcctttttctctacgacggcgagcctggcatccaagagcagctccggcaggcgactgaagagtcgctgccgtcgttcgacaagcccaagtcgcggtcgcgcgcaccgtcgtcggccgttcagcaggacctgccggcggtcgctgaggccagcacgtcgcgccacaagcaccagcatcaccaccaggacgtgcccgagccggcgcgcggccgacggcagtcggacgtcccgccgcttgagcgtcgagcgcgctcggccgacgctgtcaagcctcgcgagttctccgccaacttgaagtcggaccggcacgtcgcggcgacgcagggcgaggtcaagatccggatcgtcgactttgcgcacacgacgaccggcaaggactacctcccgctcgacgcggccgacgaggacccgtcgacgctcggcaaaaagtaccacacggtctttgacggcgagtcgggcaagctgctcgctcgcttcccgccccagcatccggatcggccggatatgggcttcatctttggcatccgcaacctctgcgacgcctttgtcggcatctgggacaaggagcgccaccgcaggcgcaaggaggccctcaagctcggcaagggcgtttccgagtcggctgctgcctctgccgctgcttcgggcgaggagggcgcgaccgagccgcacgagggcgggccggcgatgggggtcgtcgtcgaggagactgaggatctctggcagctgccaaagctctcgctcgccgagggcgagactgtctgggagcgcgtcctgcccgagggctgggacgtcgacgacggctatctgtcgacatgagtcattatatcgagcgcaagaagagggggtctgggggcggtgtcagacgcgagatgacgtcggcagtgttcgtcgagggggacaatgaggacgagacgccgtcatggatcgtaaccgactcgcctgtgcgcgacagcggcccacggccggcgatgccttcgacgcgctaccacccgctcaagcccgaggtgaagtcaccattgattcacctctcccgcccctgctcgcgattccagttcctcgtcttgccgaaaaggggagaacgcatcagggttgcggataatcatgccgttcattcttgacagggtcaggatcagcggggggactaccggcgagggtgcgtttccgacacggccggccgagaagctgtgccgggccggggtcgtgaccgcttcctgccttctggacggcctgcttccccatgtccgatagcgcttggcggtgcaacagcgacaccggctaccccctgagccagccgatcctctgagaagagccgaagaacggccgcgctggacgtctctcgtgtctcagtgatggtccgcttggcaggcaccgtcagactagagacaaagggcgagagtgcggcggtcgtctgtgatgtcgaggccgagcaatcgttgagcaaagtgggcgtctggtgttgcatcgggccgggtgtcgggccgggcgagccctcggagggtcagaaggtggtcgcgtcgaagatcgggtcgagtcaagttgagcgtaaggtgagccatcgtcatcgaggccaggagtcgccccggtcgtcgagatagttgcctgatctaggccgttgtcctcggtcgacggcgtcggatccctcggaagtcaatctcggcctcggttcggtcgtggtctgatgctggaagctctgactgataagagcccgagggctcggcctcgccatgccaagactgaggttcctgcagcgataccgcggaaagacagacgggccggtcgcggaagggccggtcttatcgtcgcccaagcccggagcatctgaaggcggtcaatgcgctgtggcgtccgggatcgattggcctcttccgttctccgctgccaatcctgaagcgttctactgctgcgatgcgctcagctccctggcgagaggtacgaccgaagacggcggcggtcgactgcgcggatccttcggtctgagggcggccttggcgactggaagggttgggggcgacagaggagtttggagtggagtattcgaggcagtgacggagagcccagtcggtcgaccgctgtcggcgcttgggacgggcacgtcggccgaagccgcaggcagtgatggcaggctggtggccggcgaaggttcgcgcacgacgggtgcaggtctggaaggctgcgaagatgatgggacggctttcagagagcacactcaattggccgcggcggaaagagggttaggacttaccgcgggtgaatggctccggccacggttggcgaccggcgcccccacactcgacgactcggccttaaggtgggcggggacgctgttgctctcctggacgttgtcgactcgctcaggcacagctgacggccggtccgtcggaactaggagaccggcgacgacgtgtgggtgttccggagccttcgaaagcaggagggaagtctcgtcaggctgcggagaacaaggcagagcagctaaaggggcaccgcaccgctggttctcgacgacgagccttcgccgctgagcctcgctctcggctaggcggacctcggtctcgcgaagcttggatatgagtgcctcgtactcgtcgagcatccgctcgttgaggacgctgtgagagggcgtccagttcgacgtcagcgacagggagcagggggttgtgcgggagggccgcgcgcgagctcctagtcaggacgtaccggaggtcgtagatcgtcaaccggagatccattttgagcaggcgagtccttcttgaggatcgccaggagaatagtctgtaggcctagatgctccatgtagtcggagggaaggcagatggagacggcgtcttctgtacgccgcaccgttgggtcgacgtcggcgggcgcacgcgcgggaggcagcgaagctcgaaggtcggcctgatctgcctctcgacctcatcctgctccgcctcgccaacccaactcttgcagcccaggtgggtccgtctgctactgtgctgtcgcctgcttcgccccgagctgcaaatactgatctctctgcatgacatcgacggcagcctcctcgaccgacctgcatcccgccctcgttttcagcgccggccgttcgacccttagccacgccaaagcggcccgcaacctgtcctctcaccctcttccaagctcgccaggatgatcctgctcggcaaggagctgatagacaagggtctcattgctgtgcgtccctgttcttaacggccggctcgctcggggctcgagctcgcctgccgagctcgccctctccgcctgcctgccctgcaccttcccggccgcccgctggacccgtcgaagcaagagtgctgatcctagctctgtcttctttgtgtcccgctcgctgcccccttgtgctccttccgttatgcgccgcactgtagaaggagctcctcaagttctttggcatcggtcggaagacggcgccgctcgtgctcgcccggctgtcgatcccccgcttgtcaagggtcgaggacctaaccgaggcccacgttgccgccctgacggccttcctctcgtcgacgactatctcggagctgccgcctcggacgccggtcgtcgacccgagcggcgagcgtgagttgctcgcgggcgaggccgccgaccagctgagcgacaaacggcgggccgaagccgactggggccgcaagatgctcatcgagaacgagctccggggcaagatcaacaccgacatccggacgctgatcgacattggcacctggcgcggtcggcggtgcgtcgtttgccttgtggcccgctctcggcctgagctcgtttcggttgacgctgacccggcctcgccctcgcgcgctcgctccgtgttgacaggcaccggcagaacaagccgatcacggctcgctcgaagcataacgctcagacggcgcttcggctcaacaagccccgccggcacttctcgacgtgcgtccttgatgtacacacgcggcctgcccgtgaagcgaacgctgaccagctcccggatgcccgccctcgcctagtgttgccggcacctcgacaccctcgagctcaccctcgccattcgcgccgttccgctcgctcttctcgtcccgcttccgctcgctctagatgcctctgcacgccacagcgcatctccgaggacgttcatgttgcaaaagtcagcgccgtctcgcgcacgcgaagccgcgccgtgcgctcgcccggccactcgaacgtgacccactcgaggctcgcaagggtcgtcatgttgcctgaggcgcggagggggagtcagggtcagcctcagatctgcgcctgcggcacgaccagaagcaacgcaccctcgtcgccgatatgaaagtcgtacgtcttgaaaggctcgcccggagcgggtcctccctggcgtggcggaacgccgacgttgaagagtgaggtgaacgacatgcccgtcttccagatgacgaccttgctctcctcgagcgagacgctcacgctgtgtcaatgagggacgaaggcgtcaggactgcgtcgcttgcagtcgcggcgcgggcgagaccgatcagacgcacagtcgccggccgtcgggcgagaagctgcaggccgtgaccttgtgcttgtggccctcgagcacgtacagccgcgtggccgtcttgaggtcgtagacaatgctgtcatccgaggcgagggaaggtcagcttgaaggactggacggtcgagcctgagcgcagacaactgacacggcgccctcgagcgtgccgacgccgagcttctggctcttgccgtgaaaggcgacggaagggaagctgccaggcagggcgcatcatgcgagtcagcccagccattgcgatccgagcccggcttcactgccaaggacgtacgagtggacgagcgactcgaggatgacggtcgcggttgagtggaccgtgtcgcgcatggccgagacgtttgggtcgagggacttgacgacggcctcgaggatgcgcgggagactcgagtagaggataagcggcttgcgtttggcgagcagggcgacgagcttcatcgtcgcgttgcgctgctcgggcgaggtcgcgttgatgatgtcgtacgagagcgtcgtcatgaaaagcggcgtgttggtcgaggcgacatgaaagctcgcattgcgcgcctggagggtgatgctgccggggttcttattggtcgccaggtgaaagagcgaccggaggacttccatggcgtcgatatagtgctgccagatctggaagccggccgagcagaggtcgatgccgagcgcacggaagggcgagctggcgtcgtcgaggtagattgtgaccgactgtgccacgtccttgagcagggccgtcgagaagaggctatagttctcaatgacgatctgaccgatgaggatcagggctcgagccgacgtatccgagttgcgctggccggcgagcttgcatgcgggaactgcaggagatcgggcgagtcagtttccagcggcgaggcaaagtgctagatctagtcttacgctcgctctgcagtcgctcgaccgtttcaataagcgccctgtcgggcgtgcgagagatggatgcgccgaagaggacgcgcgcggcttgttggatctcggctgtagaaagggcttgagagcgtatcagcgaattgttccagagagacgagcatggagcgataggacggacgggtcgcgtgaagccaatgatcggcgtagaactcgagcgaggccggtcgataggcttcgccgactacgtccggcagccgggtcgcgtagaaggagatgacctcgctcgcggccgattccatgcctgcaggggtcaggggttgacagtgaggaaagattaggatcagcaacgagcggtaatctatgggaggccgtagacgtactgtcgatcgttaagtagagttggagcaagctgatgaggctcaggaggcgcgctccggtttggcctggcgaaacctcccagattgaggtcggccgagatcgcacggcagacgtgaccgagccatcaatgctgcaacgaggccggtccgggtgtcagcgagtggaagattgactaacggtgcagtgggagccgcacctagccagacccggagtaatagatccgccttcatcggcagcccgagccgcctgaagcccttcttgggctcgggtatcgatctcgtcgtccaggccccagcagagtaagattgaaaggacaccaccaagacctgcgctgaggctggaggccttcccctgggttgatttgtcgaccgtggccttgatggagggtgatgcggatgcaagcagctgggcgacatcgaggctcagatgcagagctaatgtaaaaaagattgagtcgcagtgttagcgtcttgccacgagggatgaaggaagctcaacagggagaaaatcaccctcgtcataagctggaaggccggccggaggcaggatctgctctgagccgtcggatctcggcactaccgtttgccatccctcagctttggcggctgctaaggccttgttgcggtcgagcgatcgacgaagctcgcacgtgacgaggtcccattgtcgagcccggccgtccgagtagacgggcgtgagcaactcatcggcaacaaacaggtgcgtgagatgtcctcgagcggccgggatgaagagtgccctttgatgcacgaagctatcagcatcgaggcccagcaaacgagagaacaataagccagcctcagacgcacagctgccgcaagttgagatcgacgacggcaatctcgccgtcctctgagagcgcaacggcgcatgcgtgctcgctcgacccaaggctgtcgagaaggaggatttgctcgaccggcgaggtgaacaggactaagctggccagaacggttgccgtacttccacgaaaagaccaggtgcgtcagcgctcatgagcgaggatgcgatatcgcggggcgtgttgactcacgctgggtcgaggatggccagctctccgccttcgccgccggccaagaggtgtgaacggcctaataatctgtcagaagcatgcacgaggaaggtgatgctgctgtcgagcacagattctctcgtgtgctcttctgtcacggcggagaagaggctctgcagaggagcgtgctggacgatgccatgctctgcaagacgggagcagtgacggtcagtattttggcataagagcttggagggggtgttgagatgtacctgtgccgatgaaggcctctcccaaggcaaggtcgcctgcgctcgcgatcgccgtcacccgccctgcctctcccaaggagaacggcacagtcaaccacagcttgaggtcggcgccttgatctcgagctttgaagtgtaggcgaagcgcctctggtgaggtcgatgctttgagccgtccgcccgaaggcaagacgtgaagcagggcacaatcgacgacattaccggcgagggtcgcgagcgagcctctgcacgccgggccgcagtgaatgacggtcagctggtagcgtgagcagatagactactaaggaggctcacgattgaccagcggcaactccggcgttgtagacggcatctccctctgagcatgtcatggcaaggaagccattcggtccgagagtgacgtcgaagatgtcaacctcctggcgcccgacgaccgaggcccggccgtccttgagctcaaaaacctgcgagagtcgagctatgatgttcagtctgcctacaattgcgctgcaaggggccagtacttacctccagaccaaagtcgccccaaacggcagcccgctcgagaccgcccgcccgtccgaggacccttatccccctagcttggccaagatcgatcctgaccgagtcttccgcgatcggcagcgtcttgccgctccaagatgcgagtccagcatgctcgtcggcgccgttgcgggcgttgccggcgtcggtcgctgatcgctccttgtgcgagcggcgctgaaagaattccttcagcgcatcaactttgctcgacgcgcccgattcgacaggcgcgaaagccggcggcaagacatcgaccgactgctcgttgggaggcgaaagcgaaagcgccagccgggcaaacgtctgcggtccctcggcgtaagcgagaatgtcggccgagcgcgggctggagttgagcagctcgacaccgacgatccgaccggctacttcggtgccggccccgacgagagccagcgtccgaaggtcgacaaggacgaggcgcgagcactcttcctgcttgtgttcggcgcagtgatcgtcccagggccggccgggaggccggccgacgagcacggcgtgatctgagaagctggtcactgatcggtcgccgttgagaagcggcaggagatgcgaccattcgaggccttcaagggccggatcggctccggagagcgcgatcgaccgaaggactgtgccatcgtctgtcgaaatgatggacaggttgctgtgcaaagggtcgacccggacggtgtcagtgggccgccctcaatgtgtaagatgtcttgctcacccttgagacgagagcacaatcaggcagccagccgactcaaaggaggtcagcgctgtaactgggttccgacgactggcgcgcggcggccagacgcgaagatggccgtcctctgcttcgaagctttcggtcgagccggcagtcggcaccggtgcgggcggcagctcaagcgatggacctcgcactccaccgaggagacccggcaggtgggtctgtaagatcgagaaggagcgccgcgtctcctccgacagcggtgactgcgccaactggacgaacggcagcggctgggctgcgccggccggcggcgagagtgtcggtgagaccgggttcgaggtgatggagggcggcagtggacgaggcgacgagatactccctggccgagacgaccgtcccgaggctggcgtcgagggcagagggtcggtcgagtgatggtggccatcaccccggccggcgagcagctcgcggaggtcgtccttgcgatccgagaccgactcctcgacgcccgacaagacgggaggcgcagcctgtagcgtcgagacgctcgagacggacgccagccgactggaccggtatgtcgaccctggtaggaccggtgcggccccggcgccaggcgacggcgctctgcttgctgcggccgaggcggtcgtcgaggtcgacagggcgcgatgccgagctgcaccggatggagacgacgcccggcgcacgccaagatgcgacgcatcctcagtctggctcaggagcgacctcgaaattgaaggctttgggacaggcgaggccaaggcgaccgtcacgggcggtgttgcagctgagggttggtcgcaggaagtagggccggccaggctctgggctgctcggaagaggtagagcgagccgtcgtcacacccgaccgcaacacctttgcgcttgagatcggcctgggaggactgtctcgcctctgtcggctcgcctggcgaggcaccaaagccccatgctgtgactgctgtcagaaggaaggggaggataggccggcgtgaggtcgaggaagagggtccgtcggcagcgggcggctgatggccgccgagcgggtcgacgacgagcggaacgacaagcggccgatggctgaaggatgccgcggccatccctgtggttcacgctgtgtgtcgtgctggtcgctatgcagtaggtcccgctggaaggacgggctgaggcaagatggctgccggaggggcgcggccgatactgcggacgagagcgactcgctccttcatgcctttgacctcgaccgtctcgcagccatgtcttcgcaactccaggcgccttctggttccaagatcaatcgggagcactcgctttacctcgaggagcacacaatcaaggtgcggcgctcgggttggcttgggacaagacgtcggccagccggctgacgactcagcatcgccctccctccctcgccccttcctctcggcccctttcttgcgctcgcgcgccctctgttgcaccccgaaccatcctccttcatagtctctgctatcgacgaacctcgccgcttttcaaaagcgagcctgccttcaaccatcgagaaacgtcgacacccgccaagcctcgaccgcgcctgcgcccgaccggccgtcgaagccgcctacgacgaccgtgtacgcttcgccacttgtcggccggctgcagtcgccgtcgtcgtcgtcggcggcggcggcggcggcgttgaccttcgcgttgaccttcgcgtcgtcggcagcaccagcagcaggcgtaccggcgctcgcttgagaggagtcgtatgaagggccgacggcgacggcgagcgcattgcactttgtcaacccccggctcgtctcccatcgctcgatgagcgagaggtcgatcgctcggccttgccgcccatctgcgacgcctgccgaggtcggagaggagggatgagttgggcggcgggaggcggaccagaggcggagcgagcctgtgtgggagagggtgaggatgagggggaaaggggtgtcggcggcggtggcggaagcggatggcgatgagcgagggatgagggcgctggaagggggtgcgtcggagggaagggtagagagagagtcagcgggttcaaagggacatcaaactctctccccctgcctcagctcgaaaacgtcatgacaagagacgcaaagagccaggacaacggagacggagagagagagaaacgcacacgccaacgacaaacgacccctcgaccccggcgccctcgagcgcgacccgctcgagccggccgagcacccgccacggcccggacgctcggcgcttggccgccttcttctgctctttcgagagcggcttggccggcgctggcggcccggcaccgtcgggggggaggacagggctcggagcgggtggggggaaggcgagccagagcgcgccgtcggccgtgccgatcgcgacggccgagtcgttgatgtcggtccctttcgacggaagcgagcagacggcgagcgagagggggaaggtcggggccatcgtcgttgaggagccctggggcggatctaggagcgacattggaggaccgcgagagagcaaggggtcggcgagcggaggaaaacggcaagcatcagccctcgaagccgggcagacagtagctcacaagtcaagccagcgacgcaccgagcgcaagcgactcgatgccgacgcccgtcccagccgaccacgtccgtgcttccgagtcgtagcccgtgctgaggacggtcgccggatggctcgggaggaaggcgactgagccggcgaggttggcgtgcttgcctttcatggccgtcttggtgcctgtcgtcaggtcgactgaggagggcggcgccccccagggtcagcacgggtagacgcaacgtccggacgccgagcgtggcccgggggggaaagaaagcgcgcagagactgacagacgccgaccttcccatcgtcggtgcaccagccgagtgagcggccgtcgctccctaacgcgaggtcgttgacctctgacttgccgctgccgagaatgaccgagcggactcgggcggcggcgaacggccggaggaagggcgtcggtccgagccggagctggtggacctgccaagttcggtcgacgcagatccgagcgagctcttttggtcagtcgacgagagcactccggccctcctctgacggcaagaaagacgcacctctgcgccgcaagcgatccagacggacccccagccgtcgtcggcctctgcgccaggatcagggcccggcgagaggtcgacgacgatggcgcccacctcagccgggagactaacgacggcaccgaccggccggcccgtgccgaggtcaaacgtcctgagcgagcggtcgtctgaagtcgggagtcagctcgtccggtgagcaggaggggagaggcgccggacggacccgaagcgacgagggcgacgctctttgtcggatggaggctgacggcgacggcggccttgggcaggcgcttgatggcagggtaagcgacgacctcgacgtcgggcatcttccaggagcgagagatgctgatggcggtcgaaagtcgaggcgcttcgcacgaggccgacgtcgaaatctcccccgaccgccctcccgaccgtcagctcgctcgctcgtcaatctcgtcgctcgatgcacaaggacccttcataagacttggccatcttttctccctctctaccctacccgatgaaggtcgccggccaggccgttctccggtcggcggcggcagcagcagtaagctcgctcggccgaccgacgccggcggcaatggcggtcgtctctcaggtccgtctccctcgtgccatctcgcgctgacaaggcacttgccgcaaattgggagctgacagatctgcctcgctcttgcgcagggcgttcgtcggctgcatagctcggttgtcagacgagacgagcctgacttcgtgcgcgacaatgtcagtcgtctgttggcaggagagcgaggcccgttgccgaacaagtgagtgctgacccgaccctgctgctcgtatctctcgggcttgcaaggatttcatcctgtcgatcctcaatgcctcgccctcgctccgcgagaccaagtcgtatctagcgacgttcggcggggccgagctcccaacctcgcccggcccgctgccggcaacgcccgactcgagcgtcgacggcgccggcggcagcggcggaccaaacgcgctcgtctcgaccctactcgcgacgccgcagacgcggcatgtcgcgctcgtcaaggtccaaggtccgttcaccgaccggcagctcgagtcgatctgtcggggtctcgtctacctccagaagctcggcttggtgccggtcattgtcgtcgaccgggacgactggcatccaacctcctcgacgccagcgacggcggccaacggagagcaaacgccaaagagcaagacgaaccgtgaggagcgggctgaggcgctgaaagagatggaacgtgtcgtgcttgcgctcgcgaggctcggcgcccaagcgcggccgatcgtccagctgccggtccagctctcgggcccggagggcgagcccatcgtcgagagcgccgacctcgtcggcgtcacgtcggccgtcctcgcgggcgagatcccggttctgccgccgctcgtgctcgatagcagcagcgagctggccgtcaagcgcgtcgacgccggagacgtcatccgcggcctcgtccagggcatgatcagtgccggcggtgcgcgtcggcctccgccctctgagcaggaggccctcagcgtcggagaggactcggtcagtgcggcggccggcggtccgagtgccggcgggccgcccttgctcgcgccgctcgacctgacgccctaccggctgatgatcatcaaccgcgagggcggcatcccgtcctatgcccggtcgggtctcccccacttgacaatcaacctctgctccgaggctgcctttattcggtcgacctttcggcccgactgggtcgagagccacccgtcggcccttcgtaatctccagctcgccgacgactgcctctgcctgatgcccgagtcatccaccgccgtcgtcgtctcgcaccggtcgccgacggccctcatcggcaatctcatcaccaacaagccggcccactcgccttcgctcccgcacgccctgctcgacagccaggggaagctcacaaaacacacgccgacgctcatccggcgcgggctgccgatccagatcgtccggaacccgcgcgcgctcgaccggcagaagctgacgagcctgctcgaagctagcttccggcggacgctcgacgagaaggccttctacgaccggatggagcggcatctcgactttgtcatcgtcgccggcgactatgccggcgcggccatcatcacgcgcgagtcggcgccggacgacgacggctctggcggcacgctccagcggccctcgcccgtctgctaccttgacaaatttgccgtccacccgtcgcaccagggcgcgacggggacggtcgactttctctggtcgactctccgcgacgagacctttggcgccggcttgccttctgcgctcaacacgacgacgggctcgctcgccggccggctcgaaggccgcgacctcgtctggcgctcgcgagccgccaatccggtcaacaagtggtactacgagcgctcaaacggcttcctgacgacggccgacggccgctggaagatgttttggtgcgaccgcgaggacctcgcagagggcttccacgcgcgcgacgacggcggcggcgggatgggcggcgccggcagggacgacgaggttagccggctcgagcgctgggccgccatcgttgagcccatcccgagcgcctggtcggcctgagcgtcccctccctttagcccttcacaaccccccttagatgcgactcatcatgttgtacgaaccgagcgcggcttttgctcggccagcagacaggcgaccagtgcagcgcaggggacagacatgctagatccggcgcaacggaaaatgttctcaaagtagccgtcggcgagccgctcgagcatgtcgacactgcagatggtcgcccgttggtgctcgcgcttgacagcctgcgcctggagcgccttcttggacgtcgtcggggtggtctgccgtggagccggggatgaggtagcagccggtgacgactttgccgcgctaggctctttgtcaaagggctcgagacaaaggatgggctggagcggttgaacgaggacgaggacgatgagctggcggtcggctggccgcggcctgggccgagcgcaaagggcaaaggggcgatcgagacgggcgccgagcggtaggccgaggatgagccggaagcgacagcgttagcgaacatggttttgcaaggaggaggacaggcgttcagtcatggtgataattcggtaaagcgagaattggggcgaatcacatcgtcggtgtcttggtgaaagggagggaaggaggctgatgctcgaagggctgaggtaggctgaggtgttggtgggtggtagaggaagggaggacggaggctctcagctgcctcctccttttacactcggccgcgctcgggcctgtcagccctcaacccgctcgtccgacaacatacctagtacgagcaggagggtgaaggggacagtagtcttgggtcgagcgaccaggcgaagggctcgcttcgccccttttttacggtttcagccgccgcccgcccggcgacagcggccctttgaccggcccgttcgcaaacttgacagggcgaggcctgcgctcgcctgccatttgagctgcctacgagctctgcctgaaacgctctcacttgccagtcgacaaaagctgaaccgctgcctgatcgtcttaccatgctccggccgacgggccgactctcgcgcgtcggccggcctcgccgatgggtcgccggcgccgcctcgctcgctcgctcgacggggccatcgcaagtcgatggacgcacacgaccgacctcgttgatcctcctcaatgcctcgcccgcccgtctttcgcacactcgagtctctcagccgcggcccgacaccctactcgtcgtcaaagccgtccaaccggccgacacacggcctccagcctctgcccccgcccgcccggccggtcagcagcagcccgccgacgccgaggatccggccgcgccgcttcgagtacgagcacgtccccggctactttcactttgacgtcgcggctccgcttatcacgtccgactctgcgctcgcaaagggctgtttcggcctgctcgacacggcttcagggtgctatgagcggctcaagctcgagcttcgagagctcaacgaggctggccgggcgctcggcgagagctacaagctcatctacttcgcgcgccatcagcagggccaccacaatgtcgccgaggcaaagtacacggccgaggtcggtcctggctccggatgcgacggccgctgcgatgaacgactcgaaagctaacgcgccgcgctgaccgctttcctttcggccaggggacgtggctcacgaaatgggcgcacgagtcgaccgacgggaccatcacctggggaccggatgcgagcctgaccgagcacggcatcgcatcaaccgccccgctccgggcggcatggcttaaggctgccaaggacggcgtcatcccgctcccgacgcgctggctcgtcagcccgctgcagcgcacctgccaaacctggtgcgtcatgcagacccgtctacctgtcgctaccctctgacgccctgttgaccttcgctcatccagtattctcacctggtgtgacgtctggagcgagcacctcggcaagggcaaggatggctcgggcgtcggggtcgaggtcatcgaggtgcgcacatgcgcgcccgcgtcaacctcatcgcccctcgcgcctggcctgacacccttactctctctcttcgcttcagaaccttcgcgagcgggcttggttccacgaatgcgatcacgtcggtccaactcacatctaggctcggctcttctctcgctgacactgcctccctttgcagcgccggccaaaatccgtcgcccaggctcagtttcccggtttcgactttcccaacgacatgcctgaagaagacacgctctggcgggccgaccagcacgagagtaaggagagctgtgagaaacgtgtgcggagcgtgctcgacgaggtctgggccaaagacgacacgtacgtctcgctcactggccatgccgacatcatgcgggcgtgcttcaagggtgcgtcgtctgtcagccgagactgttctttggcctgtgctcgaggctgactcgcgctccgctcgcagtgattggccacccgatctgccccatcgtccccggccagctgataccgctcatcgtccggcggataaaggcccggccagtctgaggcgcggcgcgcggcatgcatgcacgttgcgaggacagaaaagtggcggacgggatttgattcgggcaggtcgctgtcatactgcgctcccgtccccgttatacctcgttttcctgccaggcactctttggcctttctctaggcaggcgagcctgtcgcagcgatctcgtcctgtctgcccaaaacaagcgtgggcgaggcacgaggcggcggcaatgcgacctgagcggggacgagatcgctacaacgagcggcagctgatgtagtcagagtaggccgtcggacgagcgtcctgcgccgactcttgacctcaacgtaggtcggcagggcccgccgtcagaggtcgagtgccgagcggcagcatccggatgagatgccgccggccgtcagacgaatagtcggggatggccgaatgggcgacggcgcgctaaccgtcgagggcagcgcagacgatcgcgtctcggatcagccttgagactagcgaaatagcaattggaccgagagcgtacctgatcccagatgacgaccgtcccaggctcccacttgacgcggcacgtaagatcgagcgattcgatgtgtctgtgcagaaagtcgagcaggtgggctgactcggccgggagaaagccgacgaccgaccaggccgaggtcgggctcagaaagagtgccttctcgcccgtcacctagcgcgcgcgaatgaccgaaggaggcgcatgtcagcagggagtgcgtgtaggggaatcgtacgtctgtcaagggaccgaccgggtgccggatgacgagcgggtgagtcgtcacgactcctttggtccgcgagccttccggaccgagctcggccgatcgagcaaggctcagggatgaatgctcgagctcgagcccatcgagcgttgccgcaaagctgggcgacagggcggcgaacgccgccgtcagtgagctgaaagccgtatcgcctccgcctgaggatgaaagctcagttaagaagcatcgacggggagcctgccacagggaggactcaccgccggctggaagctcgagtgcagccatgagcgaggtcgacggcgtgtgctgctcccacgtctggtcgttgtgccacagctgataagtcatgcgggggccaaggtagtcgcgcagcgagccactgacaaacaggccagggcggcggtcagcaaaggggtaaagtaagtgcaaggtttattcgacgcacgcctgcgggtcggaatagatgacctgcatctctgagcagccgacgtccttagggtagccctgagtcggatgctggtgcaggggcccaaagtgactgtgcaagcgaggcgcggcaatcagcgcacgattggtcacgtcccgggaggaaaaagggacgcaccggccgatggcaagctgctgctcgaggccgatgtctttgaaggtctggtcgcgctgagaagagcgagagatcgagcacgagtcaggcaatgatgagacggtcacaagtgcacccctctccgaccgacgacggacgaaaacgaggaccccgcgctgggctgcgagcagcgcaatctcgtccaggccggcgccgtcgaggtcggcgagctgaacgccgtgcagcctggcgtcggggtgaaagaggagccgtcagcatcagtctccgacagcgccacgtctagcgaacgtactctgagccgatcctcggcgtcagctgctcgagtcggccggcttggtcgactgccgacgcaatcgcctggcgcaagacgggcagctccggtgcggccctgaggccgacttcgaacgcttcgaacggcgggcgaggccgtgctcgagagaagttctctggccgcgtcggcaggtggtctgggtagagcggcgggtcgagtgtcgactgccgaggcggccatggtatgtctgacgactgctgctcgcgcgaggagcgtcgaccggccgacgcctgcgcagcgagctcgaggttcgccggttggctgagggccgtcccgacctggccgtcgtgcaggcgctggtagcgggtcgattttggcatcgcttacagttgactgctagctagctgctgctgcctcggtcagtaggcgagagatatggttgagcgttggctctattcgccaaagctctctcgcgagccggacgacgaaagcagcggctccgaccgaaccacgaccacgacctcctcctgcctcgcacctactctcttgccttagctacaggacctgctcttcgcagctcgagcatctccagtagttggccttctgtaacactcattcccctcaacttgtccagagcatgagccggcgctccgtcctccggctcacgtcggtctcgccggcctccctcgtcttcagccctcggccggccgcctggtcgatatcgctgcgtcgctatgctttgagcggggcggcaacggagtccaagaagccggccgccagcccctacacctcggtccagcccatcgagtcgccaccgtcggcaaccatggcgcgctcgacctcgggcccgctcaagcgctacgacaacctcattgcgtcgggcgtcttgctcaacgacgaccaccagcggagcatcgtcactcggcttcagcagatgcacgaccggctcaggacctaccacccgccgcccgtaccagaagagatccctcgaagtgctgccggaggtggaaacttcgtgcgcattccctcttgaaggctttgcgccgccgcaggcctcgtgcttccggctgacgcgctgcgccgtctcctttgcagctgagccggctcttcaagagcaagcccgagccgtacgaggccaacctcgagaacacgatgacgatcccagagggaacgccaaagggcctctacctctatggcacagtcgggaccggcaagtcgatggtgcgtcacttgtcccctgcgcgcgtccgtcggccggccggagctgatacccgcccttcgttgccctcacgcccgtcccagctcatggacctcttccactcgacgctgccgcctcaatttatcgactcgcgccggcgcgtccactttcacgccttcatgatcgacgtccacaagcgcaaccaccggtacaaggtccagtttggcgagacgggcgaccgcatgggcgaggttgctcgggacctcgcgagagaggcccgcgtcctctgctttgacgagttccaggtgcggccgagtgcttcgctgtctttgtaggcctgagttgactgctgcctattcttcgcctggttaaccctcgctcgctctcctcaggtcacggacatcaccgacgccatgatcctgcgcaacctcctcgagcggctgatgggctacggcgtcgtctgcgtcatgacatcaaagtcggtcctttctcagctacgagtagagcacagaattcactcggcgctgacgtcactgttccaacctctttgaagccggcatccagacgacctgtacaagaatggcttgcagcgcaagtcgttccttccctgcatccagctcatcaaggaccagtttgagattgctgacctgacgggcgacggtcagtcgttcgccttctgccatgtccgttgccgcctgtcgccgccggctaacgcctgcctctgcgctcgcctgcctcttcgctcgccttccagactaccgccaggtgcctggctcgcttcagaaggtctattacgacgcgaccgacccagccgacgcgtccgaattccgcaagcagttcaacgccaagacggccaaggccgaggtcgtcgccgggcgcaaggtcgagatctggggccgcaagctcgccgtgcccgagagttcgaccgacgttgcttggtttgattttgattcgctttgcggcaagaacctcggcgcggcagactacatcgaggtgacaaaggcgttcaagacgatctttgtcgacgccgcgccaaagatggacctcgacacgaaagatcgagttcgttggcctttcagctctgcatgcctgcgagcactcgacctgactgccattcttcccacaggcccgacgcttcatcaccttcatcgacgcttgctacgagtcgagggtgagtcgcctggcgtcgtctagtcacggtctggcagcttgtcactgatcgtctaccatcacagacgaagctctacatgtcgaccgccgcgccgatgctcgagctcttctcgggcgagtccgagtcgacacgcttctacagcgaccaccagcggagtcgtgcgtctcctcttgcaagctgtcgacctcgaccgtcgctgactctgctcgtcttctctatgcagtgagcgaggatctgcagctgacagaccaggaggcggtcacctcgcccatctttaccggcgaggaggaggtcttcgctttcaagcgctgcgtcagccggctgagcgagatgggagggacaaagtggtcggccttccaggaggtagcagatcaatgagacctcaagagacaaagcatcaggatagcggctggccgccgctcagagatccctctcgccccgggcaaagcgggcttcggggtagtacttggcgacgacactccggccagagaagaagcggtcgttgagcgcccggagcgcctgccaggcaccggccggcccgctaaagacaacaaagacgacgacggcgtcctcggatcgcggtggcggcggcgaccgctcgtgaacgatgacgcgctcgacaatgccactggaggcggaacggtatgggtcagctcagccttcaggtcaaagagagatttgacgagtgaaggcggctcactgctggctgcactcgtcggcaatctcagcgctcaggtcgtcatcgagctcggcaaccgagccgagcatgtgctcgagcgtgatgatccgactcggctcgccaaagcgcgcgcgatcctcggcatctttgcggacggtcgactcggagatgaccttgcccatagcggccggcgcgcggacaggctgactgccgttgattgacccggacgccttgcccttgacgggcttcgtctgaaggacctcgatcggcttgacgatgccctcggcactgcaagcagacacaccctctcgtcagtgctgccatctcacagaatcgtccttgatcggtacccacttgacgccgagcccctgaccctccttgtgaccccacttttccatcatgcgcacggcaaagtccctcgtatcgtcctcctggctgggctgcttttctgacggcttcgagctatgagaaagagagcgaggtcagggcttgcccacaggtccagaggcagatcgacgtactctgatccgacgagtgtccggtttgtgcctggaatcaggccgccaaagctcggcggacgtgcaaaacgtgcggcgatcgctgctgctgccgccctcttctcctcgagcttccgttggaactcctcggcgaccgagagttgcggcacgctgccctcagtcggcggcgctgcgcctacggagggcgcttggtactgggtggtttgcggaggaggcagtggcggcggcgcgtagtgcatcgcagacgcggcgccgtatgctgccgactgcggcgtgtaagactgagctgtcggttgcagcgtcagcggcggcggaagaggcgggggatagtacgcctcctgaaaggttgcgccgcccgaccaggctgatggcgaggctgatggaggtggcggaggaggcccgctagggtacccaaaggcatccagcggatgagcatggggcgatgccgcagcaggctggggtcgtcttgggtctgtagattgaggagcggccaactggctaataattgggttcgttgtcgctgatgccagtctcgggtccgtcggttggtcagacgactgcggtgctgacgagtatgcggtaggcgcaggtgaaggggcattccagcccgtgccctgcgagggaggatgcttgttccagcccggggacgacgtctcccagtcgccatggttcgacgggacaaagggcgtgacagctaggcccgccgccgaggctgccgccgccgcgcgattccgagccgcgtcaatgcgctcttggatgctagccgcgatcgatgacgaggctaccgacgggtcctcgtaggctcgaggctcagtcggcgcaggtcgttgcgcagcgagtgctggggctggaggagccatcgggaccgaggatggtggcggtggcggcgcacgaccctgagagagggccacacgccgagcatacgcctcatcgcccgtcaagtcagccggcacgacctgcgccggggccgggatgaagggcggcggcggcgcggctggaggaagtgccgtggcgtgctcgttgtacgaggctggcggtgcgaagcctcctgtgaagagattgagggtcgagtcgagatcaaccaaaagggttgcagagcggagcgcctgacgagagacgcacccttgtacgacggcttgacggcctcgtcccgctcgtcctccgagtagtagctgccgtccgagctctcagtcgcgctctcttgccgtctcatctcgcgctccttgcgcgcgcgctctctggcccggtgctggtcggtccgccagcggaggtaggcctcaatgtcgttcggcttggtcgggtcgtacgcctcgtccgggttgaacgcaggcaggttgtcggccggccggcccttcttgcgcttcttcttgccaccaccaccgccgccgccgccaccgaccttgcctcctgggccaggttgcggccgcttcttgctgtcggactcgagcgtaagcgctggaagggcccgcatcgtcggctgctccacggtcggctgcgggcctgagcttgtagagcttccagacccaccttttcccacctcgccggcagacagcgtccgaagcacaggagcggccgagcggacggcgtccgtcggttgcgagcctgaggcgacgcctggtgtcggcgtgaagaagagcgcagccgaagcctttgggggcttgaccttgttggcttgcggccggcgaacgggcgcgaaggcgagggccgaggaccagtctgagcaccgaaggagtaggagccgtcagggggctgctatcgctgcttcatcttgcaagatcactcgaacgcactcttcttgcgctcctcatcgacgacagctgccgaggaactcgagccagaggcaacggcgtcgtcgccggtggctccggtcgcaacggcaggtgtcgagctcacgccagcgcccgctggcttgtccgtgtcgaacgagatgccagagtatagggacatgagtggccgaaaagaaccacgccagttcgctcgtgagggtgctggagctggctgtccgacggcacctgaggcaagatgtgagagaagaggtcgagtgtcggggttcgggggtcgtcgcgacgcgggcgagcgtccgcaacgacggcgtctgcgctcttgcgacgtcgtcggcagcagcaggtaccgtctgccattgttgctcaaggagacaggacagagggcgcagagggttctgattggggagacgagctttctccaattgcatctctgccttcgcaaggctggcggaagctgcggcggcgacctcagaaagtgtccctcgaacgccgtacccctaccctctcgtccagccgtcgggaatgggcatcgttttggcaggcacacatgattagtacagctcgagcgacatgccgtcgttgatctcgtagtcgtagagggtgatgtggttctgcgaaggaagacagttgcgtcagttgatgatgaaggacgcttacatgcgggcggagcgacgcaccttgaagatgtggttggacttcttgactggaagggaagagcgggcagactggcgtcagcatacggttctggaaagcaggtggcagcaagtgccagagcgacgacggcggcgcgcggagagcacaccttcgaggacgcacgctgaattttgcggtggtcggttccagactgggcggctatgagcttcttaaggtcaccgaccgtgtcctgcggcgagcacttgacgcggactgcgaggaggcagtgcgaccggacagaaagggtcagtgcctgcctgtcggtacgcgggcggcgggcgacctgcagggcgacggacctttgcgaccgagccggtcgttggcgatgatctcaatcagcgtgccgcccatcgcccgaggaggcggcgccgcggccggcggggcagtagatgatgaggatgaggaagcaggagctaggccagctggcggcttgctcgatgacgacgatgctgaagggggcggcgggccatcccggtcctgaggccgaccgtatccactgtctcctcctcctcctcttcctcgggtgtcccggtcgtcgcctcgtcgacgatcgtcatcgcggtagcggtcgctgcctccccggcgatcgcgctcgtcgtcgtagcctccccggcggtcgtcacgacggtcgtcacggcggtcgtcgtcccgcccgcccgagtaatcaccccgaccaccgccgccgccgccctcctcccttcctgcccgccggtccgcccggctccgatagtcgccctcgtccatcggcgccgaccggcggtagctcccgcctgtcgagccacgaggcggcatgctgtcgagtgggtcatcacgcctcctaccagcaggccgcttgtagatgtcgagctgcttgggcgcgcgcggccggctggaaaaggagccgcttgcctgccggcggtcgggcgagcgtgagcgcgagcggttgcgggaggacggaggcggggagggcataacgctgccgatgtgctggttggctgacttgaaggggtcggtgcagaaagggggatgaagctggggtcgatgtcgagggcgagcgagctaccactgcgtcgtcctgcagcctgcctgcggccgccgcagagacggatgcgtacgtcctctccagcaggggtcacatcctcgcagccgtcgctttatcaaagggtccttgcagacagccatagcaggatcacaaagcgccttccgtgacgagctcaatattcgacctcctcgccatcgacccccgtcgccaccgccgcgggcatgtcccacccatcgtccgccgccgccgccgtcgtcgactcgacgtcgcgcatctcctcgtccttgacctgcaccacctgctctgactttgcaggctcgccccggccgtcggaagctgccgaaggggacggctcgggcttggccattgctgcgggcgcgacaatcggcgtcggggtgaacgaggccttttgagagcgaagctcccggacctcgcccgtcaactcaacgagcttctccttggcctgcagcgcagagaaggacggcatcagtcggtgtaattgcttccaggatgcaagctacttttgagcgactcaccgccgccgccgcagtctcgagctcgctccggctcgccgcccactcggtatcctcccggaggatcaggtcgttgacctcgagcttctgctttgcgagccgctcatcctgctcggtcgtgagctccttcggcagctgattgaatgatattcaagttgcagagcgtcagcgctgcctgatgcagagacggttgcgatcgacgacgcacaaaaaacagtggcggcacagcttgcagcttcgccgcttggctgagcggtaccggactaggcagatcaaagatcgccttcgagatcgaggccgagccacggatggctgcgccctcggcgtgtgctgaaggactagcagcgatcggggtgaagaggaagcccgagaggcggcgcatcgtcgtgtgccgagtcgcgtactgcgattgagcgtgacaagcaaagacgagagcacagcgtcagatctcggcacctgcctgtgcgtccgcggtcgcgagtggagagacgcactgcattgctcttcgtctgcagctcaccctcgagccgctcaagctcggcccgcgctagccggagcgcccgctccttgtccgcgagctcacccgtgatgaccgtctctgaccggagcttcgtttggatccgcgttgcgatctgcgtcctccgctttgcctgaggttttgcagggcagggaggtcagtctgcgctgtcgtgagcagcgcatgcgtaccggaagaagacgtaccgcatcagacccctcccgcttccgctcctctttctgtagatgcgaccggggacaatgcacgtcagccttcagatgctcagccggcaatctcgggttggctgtagttgaaccgtaccttgaacgcgtcgagcgtgctgagcaggccgccgaagagccgcttgccacgcttcttctcgtcgacgccgagcgacttcttacgcctggaggaaagaccgtgcagcagaagcccagggttgtcagtagagctcgtcacgtttcagcgttctccagggccggcaagcaacgacgcacctctcctcgcgcttctgcgcttcggtctgcgccggcggctgagcagacgcgctactgctagcagcacccgagccgtccaaatcgccccagccgctcgtcgccggtgcaggcgatgcagaaggcggcgcgtcagcggtcgaggtcgaggttgacgccgctgcgggctcgtcggagcctgctgctgtcgccgctgctgctgctgctgacgatgacggcggcggcggtgcaggcaaggtgtgggcagttgtcgcgctcgtcgacgagtcggcgaccgtgccggccatgatgtcgtcgtccggattcatctcgggccgaaggagggcgggtccggaggggggctggcggggttcgggcagcggattgcgacgagagacgaggcgaggcgctcgggaagggatggctgtcgtgcaagcaagagtcggtgtcagcctttgaacctgaccgtctcgagctctttctcgacactagccgactcaccagctcgcagcaagatgaggagtgaggctcacggccggtgaatgatggggtcgtcgtgccggcaggcaccccgatctgacccccaaccaatccccgacggtggaaatcgccgccggtggaggccctcggcgatgagcgcgaagagacaacgcggcggtctcgtccaccacttcgacgaccggcacgcctcagacaacaacagcagccctctcccatcaaaatctaatctcggaaacaacaacagcgagagagatcaggtacccgtacgtctcctcccggagccggttcccttggtcgtcggtgccggagcttgacccagctaccgaccgccgcccacccttttgactgcccgacgcgcagactgccccttgttctccccttacctcctgctcccaacatcctacatgtcctcgctctccaaggcctcgccagcggctctgttagcggccagcctcctgctcggtctctcgctcgctcctgccccgaccgaggcgcacatcgctctgtggcatccgagtgcgtcctctcaccttttcgagccttgtgcgagagctgcgccgccaccgcgtcggcttggcagtcgcctcaccgctcgagcccactcgtgctgaccctcaatcttcggcccaggcatgtacggcttcaacggcaccgctgccggcaagccagcgaactacaacaacaataacccagtggtgagattgtccctcttgcccatctcgcagctcgaatccagaggcagtgcgagcaagagagagctgacgcgttggacctgctgcgcgcccggccccacgaccccttcccgtctccccgtccctcctcccctcgcaaccctcacgcgcacccgtcaccgcttccgccttggcagaatcctctccgggagaccgaccgctacaccgaggacgagtggttccaccgctttaccgacgagccccctttgccaggcgacgtcctccggctccggccgggcgcgacacagacgtttgagctcggctgcaaccgtgcgttcacggcctaccggaatccggccgtcaaggaccgcgggggagggccgaacaacacgtatgcgtgcaacgacgccgatccgggtcgtgcgtgtcttggtcattaggcttcaggtcggctgggctcgccgctgaccttcgaccccttccgttgccttagcccttcatacgattaacgactttgggtcggagccggacgacaaatggctcggcggctggtgagtcccagctgacgctcttgacgatcgcctctcgctcagctggctgaacgctcctgtcacttccatccgtagcgcactcggtatcgcgtataacagcgacgttcggagcctcaagccgcaagacttcaccatcttctgtaagcagccgcaacctgttccgcgacgatggttgacggaccctgccgcactgactgacatcgctcccccccccccccattttgttctgacagccgtgaaccacacgtgcgtctggacgcgcgaaatctcgttcgagatgccggccgacctgccgccgtgtcctgccggcggctgcatctgcacctggaattgggtccataccgcgggcaactacaacgctgctggccggaccgaaggctacgcgtccgagttctacctgtcgacctgtaagtctgcctcgagcgcgagcggacgtcgaacgcggtcagcgactgactttcccgcttgacaacgcctgcagacaagtgtgacgtcgccagctcgaccggcaccaaggcaatctctccgcccgtcgtcccgcgtgagtgcctcgccgacccctcgcgctgccggcgaggcgccaagcagccgctctactttgcccagaagactggcaacaatatgccggatgactggaccaagccgccgctctacaacgccatgtacggctttgccaacggcgcgcaaaacgacatctttggcgagaacgagatcacctgggaggccggcggccagctgccggagggcacgggctcgggcacgggctcgagcacgggctcgattgccggctcggcagcctctccgagggcggtcgttgacggccgatcggtcgtcgcactcggctcgggcactgcgcttgctgcttggctgcttgtcggcgcctgaagtcggtcctttctggtctgtcgaaaaggcctggctcggtccgctcttgcaagatccccgtctctcgccttgtatcgctctgttttcctcttcttttgcttggacctccctgcttgtcccttcgcctcatgtagctctacctccgctcatgcgttctccttgcccgcctgctcgttcgtacctagactcttcgctgccacctagactccagctcgatgaacgcttgcctgtctcgctccggtcggtcgagggaatggaacagagagctcatgagattcgtttttgaaaaaggaggagcaggcgcgcagacttctagaggaggatttcgtcagactcgcccttttggctcgtagcttcaggtctcgtccggcgcatcgggcctgactcggcgtcaggtcgagcacgggctggcgggagacgaaagagcggccgagagtccgtcgggcgggctgggagagcgcgcgcatggagggccctcatgccgggagctcgaactgcgcgcaggcgaacaaagaacggcgccaaatggtcagctgcgctcctcaacagggcagcagcaaaggaccgagggagacgcaccttctggccgcgcaggactttggtaaagtagatgtagaagaagtcgatgtagaggccggtctggacgaggccggcgacgacggcgattggatcgaccgtgtcctcggtgaagtacctgaggggcgcagtggtcggtcgatcgactcgaggtcagcacggccgcgctacaagccagatagtctctccgacacttcttctgccagcaggacgccagacgcaccggaagatccagttcgggatgtagagcccgcggtagatgccgagcgccgcgaggtagtgcgtcgtgatcgtctctgcctcgcccgtccgctgcagcataaacagctgggggaggatcgcgaccgactcgaggtagatcgagaaggcccagagaacctcggtcaccgtatactggtaggtgatgaggagcgagaggagcgcgcagggcccgatcaggtactcgagccggaacgtgtcgatcccagggtcctgcgtcgggctgcgtccgagaggggaagggagcgggtagagttagcctgggtgttgctaaaggcacgatcgcaggccatgcggctcatgtgggtcagaggaggcaagggcagctctcggctccgctgccgcccgcccgccttgccctgcgagccgcgcctcgctcccgatgagctggccagactggacactgaccggaacttgaccttaatcaggtagagcgtgtagaccgacgaggcgatgaagaagaccttcatgatcgtgttgtagagcgagtagtggggcgccgtcacgaggtcgacatagcggcagacgaagacgatcacgtagaggagctgcgtcttgaacgagattcctgtcgagtgcgaggcgcagcggcgtcagcgacgtgagatgaaggccaggagaacgtgagacgggccgcctgcaggctgaggacggacctcgggccgagcgcgacgtctggattttgtggaggaggatgaggatcgaagcaagatgggacaggtcccctggcggaggcgaacgagcgagcagcggaggcgcgcgcgagggagggagggaggagaagcagctcgaggttagtcccacagaactggccgagctaaacgagctcccggattgcacctagcaggcggaagaggttcatcctggtgcaaacgggcggagagggtaaaggaagggggactgaggtgttggtcggagggccaggacgcgccggcgtgccccgctgcgggccaaggccgccgtctaagtccctgccgcgtcgagattgctgattcttcaagtgattaatttgggctgccaactctcgcccgggcgcctcgacgccggctgcgcgcaggcctgctcaaggacacagtctatccaaccacttcctcctcgacctctccacagcttccctttactttagatggccgacgcaccgatcgccaacccgcctgcgggccaggttgacaagagcaagcgtaagcgtaaacgccccaacaagacgggcaaggcgaccgacggcgccaccccggacaaggttgccgtcgccgacaaggacgttgcctcgacctcgacggccgcagctaagccgtcggcgagcgcgctcaagaaggccaaggcggcggcttcgctcaaaaaggctgagcttgcccgggctgcggccgagcaggaggctgaggatgccgagccgtcgtcgaacgaggaggagacgcagacgctcctcccgccgtcagcagccgccccggtcgcctcgacctcggcctcgtcctctgctccgccggccgagctcgagccgctgccttcgacctcaacctcggccatgcctccgacagcctcgtcgtcggacgccagcggcatgccggcagacacctcgtttgcctcgctcaacctctcgcagcagacgatggccgccctctcagaaatgggcttctcgaagatgaccgaggtccaggcccggacggttcctcctctgcttgagggacgcgacgtcctcggcgctgcccggaccggtagcggcaagactcttgccttcctcctcccaagcatcgagatgctccaggcgctgcgcttcaagcctcgtaacggtgcgtcttgcgagggcggtcccagcctgagctggcggaaccaggggctctcccccgtctggctggtgcgacagctgaccacgttgaacgctgcatctcaaaggcactggcgtcgtcatcatctcgccgacgcgcgagctggcccttcagatctttggcgtcgtcaaggagctcatggcacaccactcgcagacgtttggcatcgtcatgggcggcgccaaccggaaggccgaggccgaccggctccagaagggcgtcaacctgatcgtctcgacgcccggtcggctgctcgaccacctgcaggtccgtccctctcttcgagcgatgctgcagcagagcatcaggtcgctgacgctctcccgtctctgcgcccgacagaacacgaagggctttattttcaagaacgtcaaggcgctcgtcattgacgaggccgaccggattctcgagattggtttcgaggaggagatgaagcagattattgccctcctcccgaaggagaaccggcagacgatgctcttttcggcgacgcagacgacgaaggtcaccgacctcgcccggatctcgctccgacccggcccgctctttatcaacgtcgttccggacgcggcggcctcgaccgtctcgacgctcgagcagggctacgtcgtctgcgagtcggaccggcgcttcctcttgctcttcaccttccttaagaagaacaagggcaagaagattatcgtcttcttttcgtcgtgcaagtccgtcgactaccacggcgagctcctcaactacattgacgtccccgtcctccaccttcacgtgcctagctgccctcgttcccttcctgtcactcgcttgcacggctgacctcctcctccaccctccccgtctggacggcggcgggcgaagaggtgctgctgacggcggcccgcgaggccgagaaggcctcgaaggcgcgctgctgcgagtcgaggaagtcgtcgagcgacagctggtcgagcacggacgagacatcggctgaggagaagacggtgatgccccttgcatgcgatccagtgtccttcaaggcgagcttgctcgtgctggccgcagaggcggcggtcggggcggcggctgcggaggaggaggcggccggcgtcgaagggcgaggggtcattggcggcgtcggacgcttgagctcctcccaatcgaggatcgacgagacggtcatcttggcagcttgttgagggataaagttgacggaggatgctttggatgggaatggatctgagagtgagatggctgtcggaggggcggatcggagctcgctgtcgcgctagccatctcctcctgccgagtttctaacgtgactcgcttgacgactctctcggaacagaaagcgatgatacacggacagcatgtagatcacagggagaagagaaagagggccttaatcgctacagtcgccagtcgctcccgccctactgcttgctaggcttgtcctttgcgccctccgccaggacgtcctggcccttcagcgcctcctcaatcttaatgccggccttgcccgtgtgaccctggccgcccgtctcctcccaggctgtcccacgagtcgaaaggaggttctcgccgtggccgagcttggcctcgtcgggcgcgtcgcgcgtcgcctgcgcggacaggtggtcggccgtcgactgctcggcgcctggcgtgggctcctcggggtggtcctgcgagggcggcaaggaggtcaggttacgagaacgactgcgctgcaggctcggtctagcgaacgcaccgaggaaagggtctgcgagaacaaggcagagcaggtgaggtagtcagtaagacgctctcgcgcgcgcgatggcgcagtcaatgctctagctcccggcatcgagtacctctctgctctccgatgcagaagaggcccctccgacgccgacaactgcggtacgttagatggccgggcacgcacctgcttgaccttgtccatgacacccatcgaacgggccgacgccggcgagacgcgggcggcgacgagctgctgctgccgggcgacggcgacgcgaggcgcagagaggatcgaggcgcggaggaaagacatcgtgtggcgcaggtggatgggctgttgagggagttggtcaaggtgagagatgagtgggggtcgtggttagcaggtagctcccaggtcgaccgctcgactccggtcgatgctcccttgcagtcaaggcagatcgcggagcggccagccgccgaggggcctctgacgcaggcggggcgggagtaagccgaaactgctcttacacatcatcgtaacttaaggagtctccgcggccgccggcgaccgaggagaccgaggaacgccatcgcccctctttcctcgagagggctgagaatggccggccgagtcgttcgccaacgctcacccgaacctcctctttccaaccgtgcctttcctcccctttgatcctcactcgcaatgtctgacagcaccgtcgcgcctggaaggaaggtgggtcttacgcaagcctaacctctcacgcgcgggcgggcagcgccgaaggctgaccggctcgagtcctcccaatacccgaccaggtcctcgtcaccggcggctcgggtttcattggcatctgggtgcgtccttcagagttaaagcaagcgagatgggtgctgccgactgaccgtcgtttgcttcctttctgctcgcaggtcgtcaagaagtaggttgccttggccgggccggcacattgcctccggtctctcgactgacgcttgctttcgtctaggtacctcgacgccggattcaaggtcaggacgaccgtccgctcggccaagaaggtgcgagcgacctgctccgactcctgctgttgagaccgtcagactgaccttctgttttgtgtcggctcggaacgaccagggcgagtacatcaaggagcagtttaagggccagccgatcgagtactgcatcgtcgaggacattggcgcgcccgacgcctttgacgaggccgtcaagggtgtcgacgccgtcgcccacactgtgcgtcgagctgcggcgtctgaggttgtctttgcctctcaactgacgcccgccccttggccccttgccttgccgcaggcctcgcccttccacttcaaagtctcggacccggaggagctcgtccggcctgccgtcgacggcacggtcggcatcctcaagtctatcactaagaacggcaaggacgtcaagcgcgtcgttatgtacgtcgcactttgggccgtctcgcagtcgcagtgcctccaggctgacttcctgcttcgaacgcagcacgtcgtcggtcgccgccattcaggagccacacgacgctcctttcgtccaggacgagtcgatgtggaacaacgttcgtcctccgcatgtctgtgtgaggcgtcgtaacctgctgacgacgacctcgctcgccggccgactagtactcgatcaaggacgtcgaggagaagggcaaggactgcaacaagattcacgcctacctcgcctctaagagctacggtttgtcgccatccctttctgtcgctccttaaaagtgagtcgctgagaagtctgcccctcgacagccgagcgcgcagcctgggactacgtcaaggagcacccgatcccgctcgtcacctgctgccctccgcttgtcttcggcccgatcctccacgaggtcgccaagccagaggacctcaacacctcggtcggcatcttctacgacattgtggccggcaagaagacggaggctgacctgcctggaggcggaggaggcgactgcattgacgtccggacgctcgccgacgcgcacgtcctcggcctgacggtccctgaggccgccggcaaccgttacatcatcagccagggtacgttcgctccttcctgccctgcctcctcgaccttcgctgatgccccgccccgacacgcttgggctaggccccttctcaacggccgagctttgcgaggtcgtcctcaagctcgcgcccgagacgccgaacgtccccaagcccgaggccggctcagtcgccttctggaaggaccccaagaatgtcgtccgatctgacggcagcaaggccgagcgcgagctcggcatcaagtaccggacggtcgaggagacggcgaccgacagtgcgccccgctctcccttggctctgctgttgcctcgctacgagctgacccttcttccctctctctctacagtgtacaacagcctcaaggccaagaactggtgactgccgggagcgaagctgtgagaggggctcgatcgatgactctcgtgatgaacctctgcggatccggcggcgacgcaagccaccgacgctcgacctcctcctgtccgcagcagagccgccttctacagcgaccggaagagggacggcgatccttgctgggcatcacggtggcccgtgggctactgtggccgaccagaggagagggggtcgatgaagcgtgcaacaggaagctgcgcgctgagaagagctgcccgagtgagtgctggctgtcaggcggcccaaggcgacgccgaccggttgcgggtaccgtctgccagaagggacaagcaatgccagggacaagcaaacgtgaaggcgataggacggccgggagggttcggccggccggccaaaggggcagcacaacagagttcggctgcgcggtgggcgaccttcctccctccgaccgacctcccctcccccgcagtaagatccggccgtcgccaaactgttgatcagggcaagatgagagagagaggacgagctccttcctagccctcatcatctctgccttcctctgctcccctctctctcttgtacgcggccggctctctgaccgacaggctgccatcgctctccgcctgcgactgcttcgctgctgccccgcatcgtctcccccgcactctctggccagagcaggccagccagctcggaaccagcagctatggctgccgaccacaccttctcctcccaccaagctcctcctgtctcgtcctcctcttcacgctcgtcgtcccgtcagcgccggcttggctcgctcacgccactccgctcgccgtcgccgcctctcgcactctcggcaacgccgtcgccgcccgagtccgtcagcgaccgctctgcagctgccgcctcagctccgacctcaccagccgccagcacctacaacgccgccggccgccgtcactcgcgaccctcgctcgggctcgactctctgtccggatccagcagcaaggcaagctccggatcttcctcagtcgagcgatccccgggcccttcgagctacaaggcggtcgacgaccggcgaaccacgtccgtccgagctgagttccgacgccgacgagaggccgcgaagcctgcttgacctgctcaagggtgacctcgaagactgacctataacatcctgcgcacggcagcagcagcaggcgtaaccggtcgcactcgtcagccttgactccggtcggctcctttaccttcctggctccgaccgtgccgtcgacctcgaccacgcccgctggcgcctcggacgctgccgccgctggtgcacctcgagtcgcactcgtcacactccgccgaccgctctacgctcccgcagcgactctcggcgggcccgtccaggcctcctcgcagttactgcttcagcactcgcctcagcactcgacctcctccctggcgtcgacgactccggcccctttgacggcctcgcctccgagcacttggctccctccggcagcccgctcattctctagcgccaccccttccggtcagccgagcgcactcgcaagctcctcctcctcctctggcctcacaagcagcccgccaggtcactactcgtttggcttcacgccgaccggaccacacgcgccgaaccccgtccggccgaagccacggtgcgcaaacccttttcacctgactctgccatgccgccgtcaggctgactcgctctcactcatggcccaggtctcgcaatagctcgagcagctcgctgagtacgctcgcccgtcggtcgacgcgaggcacgactccgccctcgagctcgattttgctcccgtcagcgtcctcgccgccggctaccttcaacgtcgtctacccgacgcccggcctcagcccgcctatcgcgctctcgccgctcggcccctcgccgtcgctctcgctcaccgcgcttcacagctcgcctcgcctttcccagctcacgccggcctacccgccgcccaaccaaccacaaccgacgtacgcagctcccgtcgcgcggaccaactcgctgccgtccatctacccctttgcgctcggcttctcgcccgtctcgcagccgtttccgctccgtgccacgacgacgcacatggacgggccgcaccacccggacctgctgggactgcacgaccaagagatcccggacgaggcgccgccctcgtacgatggtccaccgctcgcctcgtcggcctcgcacccgaacctcggcgtcgcccatccgttctactcgcagtcgaccgtcgagcttgatctcgcccttcatcaccagcaggagcgcgagcgcgctcagtactaccacggccgccatgcctccgaaggccggcaaggcgcgcgcagcagtcagccaacgcccagccactcgcggcgcaactcgtttgacggctactcggacgcgagcgagaccgagggcgagcgaggcgggctcaagttcacgacgtcatcttcgtcgggcagccgccgacggaatcgacttgacctgtctagcgttggccgagcgcggcccgggggcggcatgtcatcctcgagcagcgtcggcgcctctggcagcggcaacagcgcgctcgggctcgtcggcctcggccgacaaggtgctgatgggcttaggaggggcgaaggcggtctccggccgcgcaggccgatgctcgacacggccgagagtgggcttgacatcaacatcctcagcacagatggcgaggagccggtgcgtatccgcggctgtggcctgtcgactgagagccgagcggggctgccttagctgataccttgccccgctctgcaccgcacccagctccccacctcgctgcttcggcctccgccccgcccaccatcacgactggcccagctgatcgagtcgctgccacttatcatggcgcttcggctgctgtcggccgtgccggcggcgatcggcacggcttacctgatcggccgctctctgggtggcgtcggcgtcgagggtggcgccgaggatagccgggaggacggtagccggcgcgaatgcgtgctcgccatcttctgggtccgtcttgctgcccactcgagtgattaaacgtgtcgctgaaccgcactcctgcttcctctgcagacgctcctgaccgggatgcagtgcttcctcttgacgtccggcctgacgcggcgctggctggcctactactcgctgccgtcgacgttgcttcggctgctgtcgctccaatcgatctgctggccggcgacgtcgctgacgctcaagctcgtcgggccctcgcggccgctcattggctgggttctcatcggcacgacgacgagtctgagcaacacgatccggatctgggtgacgagcaacattgcgacgtttccgcgctcgggcggcggcctcaacggtcgggcgcatcgcggaacgctcagggaggcgctcagcgtcgccaacgaggacatccgctacgcctcgcgctcgctcctctcgatcgtcattggcggcaacggcgaaggcgccgacgactgggacggcagcagcggtgtggctggcgccggcggtgttgcggccagtgggaacggcgccgctcggccgggcaagacgctcaacaaaggcgtcgtgcggacaaagcggcggatggactggcggagtgtcatccgccaggttgtctggccgtgcctcaccggctactggctgacggcttggttcctcgtgcgtccccgctctcccttcgccctctcgttgcctccgactgacgacgacttgaccgccttcgcttgtatcacagctcctggagcgggatgcgtcgcgccggacagacggcagggcggccggcttcggctactgatcgagggccctcgcgccgccctatcctgtacgataagcgcgagcaacgcgctcgaagatctctgaaaaataacgttgtttctaccaatgaatttcgggggccgacagcgcctcttttgagcgagcgcgaccgagagacgggagttggtatgctagcgggcggagatgcgtgaacggacgcggacgaggaacagcatgggggcggctgggagcccgcgcgcgacggtatgcgagatggagcggatggaagagtggggaatacaacgacgacgattgcgcgagagttggagaggcccaaacagaggaaagagagagcgagagagagaagcaaatcaaaaggtcaactcggagcgctcacgcggccggcaagggtgccacctcgggagcctggtcgatggccgggctggcagccgggacctgcggaatctgctcggtcgacggccggagggcgagcggcggggctgatggcggtgcgtccgagggtgagacaaccatcggcggcgggctgatgggcggtgccggtgagatctttgagaagccgccgagggcaaagccgttgccgagcgcgtcggtgaccgagatggtcgagagcgagcgcagtagcggccggacgagcgagtcgcccgaggccgagtggtggcgcgagcgcggcgggcggatgacaccgctgccgtctgacgacgacggtgcggccgacgtcgacgcgttgaccgggctgccgtggctcgcaccgctcgggaagccagccgccgtcggcgagggggtgaaggtgagcgacgtcggccggcggccgaacgggtcaaagaagccggacgacggccggcgatgagccgacgaccgagagctggagcgagagtgcgcgcccggccgagatggggcaatgccggccgaccgaggaggagcgaacgactctgggtgaggcgacgacggcccagacgagacgccccggaagtagccgccgggcgagactgaacgcgagattggctgttggacctgaagcgggtcgacctcgtcgaccggctcttggttcctgggcgactcgaccgtcgtcgcgatgaccgactcccgcccgttgtccgtgcccgacgcgctggcccgctcctcagctgcggcggccgagaggatgtcagacacgtagcgcgagccggccggctctcctgggtacataggcgactcgcccgagacaaggagcgagtgctcgccgccttcgcggtactcggcctcagtccacggcgggtcgagctcgtcaaccgcgcggacctcggcgcggaactcgttgacctccttctcgatcgcggcccggaagtcgtcaatcttggtcaggccctcgacctcgacccacttgtcgaacgggaccgggcaggacggctcgtccgactcgtcatggtacgaggccaggtatgggtgctcgagcgcctcaacgaccgagatgcgccttgccgggtcgaagatcaaaagcttggcgagcaggtcgagagctgatcgggcaggagcgccgaggtcagcgggtgggcgaaggggcagaagcatacgatgggaggtgacgactgaccaagcgggtcggcctcggggtagagcgtcgcaaagtcgacgggctcgacccgagggagcgagcggatgtacttgcacgccttgtcgctcccgacgcgcgtcagggtctcgttatcgggcgtgccgaggacagagagaatgaggtttagctggtcgacgtagctgcgggagggacggcacgcgcgtggtcagcctttggcacaatagtgcacctcgcggctctcgacgacttactccttgcctttgaagataggcttggccccgaggagctcggcgaggatgcagccgatcgaccagacgtcgatcgccgtcgtgtaccgccggtacgacagcataatttcgggcgcacgataccaccgcgtggcgacgtactcggtcagcggcgacccggccgaggcgtcgtggccgagcccgtctgggtagaatccccgcgcaagaccaaagtcgcagatcttgagctgagaggagcagagggtactgaatcagcgaccgtctgtgtgacctgcggagaaggaggccgcacctcgcagtcggcattgacgaggacgttgccgggcttgatgtcgcggtggagaacgtgggccgagtggatgaactgcgggggcggcgggtatgagaggtcagctgaggaaaagagggcgacgccaaaaagcaagagaatgcaccttcatgccccggaagagctggtacatgaagtactggacgtgcgagttggagaggagttggccggatcggatgatctggtgtaggtcggcctccatcggttccataaacatgtagacctcgttgtagcccgagtggacgacgtcgaggtctatcaggccggtgatctttgatggagccaaggggtcagtcgcacgaaactcggcaagcaggcgaattgaatcgacgtacgttctcgtggctggcaaagtgcctgagcagggtgatctcgcgcagtgcccggcgagcaagaacgaccttgtcgaggacgcgcgtgatcatcttgatcgcaatcgtttcgcccgaaatctcgtcctgggcggaaacgacgagaccgtaggcgccctggccgagctctgaaggcagcgcacagcgaggtcagatcgcgcaggccggccgaagctttgctcagacaggagagacgcacctcggacgagcttccaacgcttctcgacgtggaagggccggccgaggcagaggaagctgtggtagcctctgcggtcgaggttgcgctcgctgagcgggtgctcgacctcttcgccggccgaacggcccgtgccgtcaacgtcggtatcgttcgcatcgagagaggtcgtgtcgacgccgtgctcattcgcgccgagcaagcccgtctggcccgctgccgacgccgccttggcctgcctggcagcctgggccatgcccttcaggccggcctggaccggcgcgtctgagccgctcgttgcagtggaagcagcggcagaagcggagccgccgccagcatcagagcctgcggtcgacgaacacgctttgccgccgcctccaaccgtgccagaggaggttgtcgttggggcggtcgtcgtcgagagcgaggccgtcgacgtcgacggctgcgagtgggccggcgtcgaactgaccgagagcatcgaggggccactctggccatcggtcgcggatgaagagcggtcgtcatcgccggcggaggagctcggctggccgttggccgacgacggatgcaggctcgagaactcggggtcatgacgagacgagccggccgaagccactgctcgccgtgacgacgcggacgacggcttgcgctcgagcttgggctgagcgagcccgctgccttccgccggcgacagtcgtgcgccgtcaggctgtccggtcatcgcccctgacgacgcaagccggccgcggttacgctcttggtcgtcgtcgtcgatctcgtcgcctgacgactcctcgccggccgagttccagccgtgcttgagcgggtgcgagcccggcccaccatcctggcctagaccgccgccagacgaggcctcgctgccgtttggcgaattgttgccgctcgcgagcatgcggctgacgccgccgccgacgtacgagccggccgagagaagcgcccgctcgagcagtgacgacgtgctcgcgctcgatgaggctgatctgagcatgagagggtgctgagcgtagccgtagccatggctgccgctagcgctggcgctaccactgccgacactgtcgccgtcgactaagctcgagccgaggtgaaagcgcgggtcggacggcgtcggcgacgtcggctgcgagggtcgccggaggccgtgcgtcggatgaggcgtgccaggcatgatgccggacgggtcctgccgaggacgctgggaaggaaagctccaaagagctgaaagaggtgcaaagggtggggagggcggaagcagagtgtcggctggagttgcgactgcagcaaatagacaaggctggtgtcagcgttgcgtacgagcgaggactcgactcggagcagctctgtggtatggttctccttctctcccgaggccagccgacgggtgacagggccggtcggccgacctgcctgctgccacatgtctgcggcctctgcccgacgccgcgagccgagcccccgcacgtcctagcgagaggaaagacaagctgcccagctttgcgagcgacatgggcaagaagactcgacggcctagcttttgccaagcccggccgggtctggcggaaagcctgggttaagtgacagcggccgagggctgaaggactggcggccagcctctgcggcggcagtcgtcactccccttctccgtgtcccttcgtccggtcgccccctccactcgacgtgagaggtgcgaggtcccttcatatgacgcctcctgccggcctggagacggaagggccgaccctgaccctgccgagaggggggagcgcgagtacctgccgcctggctcgtcggacaaaggccgcgtgcgggggctggcaggaggcagggacgcacgagggctggccggcgggtcgtctgagtgaagcgtcgtcgcccggcagagacttaaagactggagtcgggtactgactcttgagggtcggcagagactacgggggagggagctgaagagtcagggagcgaggtcgagggacgagtctagcaggagacgagaaggcggcggcggcggccggcgacgcggcgacccgaggagcggcagtcgagccgccgtgtggcccaggctctcctgcgcgagagaagtgccgacgctagacgttgtgtgccagcgacagtttgagacccgaccgtcggtcgagccggcttcggcgggcgccagcatgggcagccttcacgtgctttgcaacgacacactccgtctttgcgagagccagaacgagcggaccatgataagccggaaccgggggggggggggaaggagaccaacagaggggtgacagcgagtaaaggcgtataggcgaagaccgccgcgcataaaggggtacaacgggaggaggggcgtgcacgggcgatgatcacaggcggagctgccaggaggggggcttgcggcgggagtacaaggggttgaagaagcaagagaggagactgccgcaatcactgccggccagagggaatgttgtcgagctcgacctcgtcgccgctctgcaagacgtcaagagaaagaagattggtcagcagggtgtctagaaatggttgaggcggcagactaaatggttgaactgacctcacgatgctcgccgacgctgcggaggccgcggctgcgagagcgactccggagtcgggtgatgttctcgttgccgccgggctggcggtagcccgtcttctctggcgcctcgctcgggatgccgcctgcaaagtcaacgccgttggccttctcctcgtcgatggcgtcgtgaacgcggacgcctcggccgcgctcgctctcgtggaccgagcgaacgctccgctgcgagacgttatcgggcgggcccgagcttccccagagcttctccgacttggtgaagacggtgtcggcctcgcgccggaagccgacatagtcggcggcaaactcggcgtgctctgtgtcgtccatgccgacaatctcggcctgctcggacgcgcggaagtggaggccgggaatcttgtcgatgacaaacatgatggcataggtgaccttgagaaggaacagcggctcaagattagttgaagcgagcgaaatcaggggtcgagacgggagacgggagagacgcacgacaaacgtccaaccgaagccgacgcagatccatgcgacctggaggccgagctggcggaagttgcggtcgagccagccgcccgggatggccgcgtagccgtcgaggttggcgatgtgtgcctgggcaaagatgccggtcaggaaggtgccgctgtgagtcgcgacaaaggaaggacgagtcagcagtggactcgtgcagcgataagacgacggcgggcgcacatgatgccagacagagcgtggcaggcgaaaatgtcgagcgggtcgtcaacacgcatcggcgccttgaggccggtcgccaagttggagcagaaggacgacaggaagcctgaagggcgaagggtgacgagcgtcagcgacggcaaatgagaaaagacctttctgcaggcaggcggagccgtgcacgaaccgacgaggacggccgcaggggcaccgacaaagccggcagcgggcgtgatggcgacgaggccacagatagcacccgtgcagaagccgatgcacgaccacttgcgctcgagccgccagtccataaccatccacgtcaagccgccgacggctccggcgaggttggtcgtgtagatggccatggccgcgcggaggttggcggcaaatgtcgagccgccgttgaagccgagccagccgacccagagaaggactgtgccgaggacaatgtgcgagacgttgtgcggcttgaagaggacctcgccgccgcgccgcgggccgaggaagtacgagtaggcaaggccagtcactccagaagcgacctcgatcggaatctgggcgcaggacagagagagtcgtcagcacaaagcctccgcgctctcaagctgccaggtctggcactcactccgccggcgtagtcgaggacaccccactggaatgcccagccgttcgagctccagatccagtgcgcgagcgggctaaaagggggcgatcagaaggtcagctctggcagcacccgaaaccgagctcctttatcctcaacgcgactcactcgtaaacgagcgtcgtccagacaaaggtaaaaaccatcgccggcaggaagcgactgcgctcggccatggcgccgagggcgatcgccggcacgagcgaagcaaacatggacctgagcggcgccgaggggaagaggagggtcagctcggtagctcaaagaggcgtggcagaccaggggcgcactggtagatggcaaagacgagctccggaatcttattgttggcctcgccgacgggcagctccaggaccttcatgaaggcaaagttgcggaggttgccccagaagaggccgccggtccgcgaaaaggtgagcgagaagccccagaagaaccactggaaggtgacgacggccatggctgaaggagcggcaggtgaggggattaggacgggtgctgcgcgtgcgagcctggcggccggcaagcgtgcctggagggagcgagcgaagggcacacgcaccacacatcgtcatgaacagcagactgagcgcgttcttgcgccggacgagaccgctgtagaggaaaccgaggccggggatcatgagaaactgtcgcgaacggcaagcgggtgtcagcggagagggccgcggctgtgcctggtcgaccgggaggcatgagcgagagggcaacgcacgacgagagccgagcaggtgaggacccaggcaatgtctcccgggtcatacgccgtcacgacgccctcggcggtcgagatgaggtcctagagagttttggcaattcagcccaggtaatcggctgcgcagagagacggcaagatggtgacggccgacaagagagggggacgcaccgtgcctccggtgttgatggcaccagtctcggcattgatctggccgctgcaaagcgaagagcgacagcacaggaggaggacgagtcaggagatgcctgtcgaaaaacaggtcacagtcgggcggacgcactaggtgaggttgggcatcgtcgcgagacagacgggcggaaaggaggcaggcggcgatgcgtgcgggcgatgcgagcgggcgatgtctttgctcgaggtgcgcgggatgaggaaaggaggaggaggaggaagaagggggggatgctggtcgtcgggaggaagccaaggacgggtcctctcccttcttgcttgcaggctcgagggagtcgcctaagaaaatgccgccgagataagggctcgaaattcggaggcgaatttcaggccaattcaaagagcagagattgcgggacggaggctgtcctccctctccattgtcccggcccgcgccgagtaggggcggcgtctcgaatgaaaatccatcctcgcctggaatgctcgtaaagtgctaaagagctttcagcacggaggcgaggttgccagactgcaatgagcggtcgttaaggagaggttaggagttgaaacgcaaagcggagccccagcgagaactagcgctcgggccgtcgctcctcctcctcatccttcgacgacatctgcctcacggaagcatcagacccttgctctctgacggctcccagacgaattatctgctgcttgcaagtgctgaccccttctttcaccagctcgctctgcccgtacaaaaggggcgcgtgaccgcggtcgctgacgtcctcggcccctttgatcgcccaacccttcactcgcctgctcggccaggatcccttcaccggcgacgatccctcaaaagagcggagcggcggaaggaaggcagcagcttgctctcgctccgtctgcctctcaccttcatttgtccacctaccaccgtctcgacgttcggcttttgccctgcggctcgctcaacacgccgtcaactcctctccgcggccttcccctcctccgccaccgcctagcatgccctctgacctgcaggccgagaagggcactctgcctcggccggtcgtacgccttcactccagcctcgcccgcgaccgaaaccggcagcgcaattggccgttgctcaagctggcgctggtcgtcatcggcctcctctgtatcgtcctctggcatgtcaggccggcactcgggctcgcattctccgaggccttctccagccgtatctttgacgaagacagctctatcggcgctctcaaagtacgatagcgtcggcctggcaagctggctgctgcgaacctgaccctcctcggcctcctcctcaggcctacatcgaagagcgagccggcctcgtccagcccagcatcctcgatccttacctgctagagcagcgtctgctcgccgccgctagcgcccttctcgtaccggccgacgctgctagcgcactcggcgagaccaaagagctgtcagtcgaaagcttcggcggcgtacccgtcaagcgtggcggcctcaaagcgcgtgagctcggtctcttccttttgtggccaacagatctggagtcatcgacaacgtcgtctttgtacgtccacgcctctgttcattctctctatcgcgacacgtagtctgacgcttttcactttgtcctgcagcctccttcagagctatctcgcctcaccgacgtccgaggtcgcgcatctcatcatcctcattaaaggcgacgcctcgacctgccgaaagcacacgcgtcggatccaggctaacaaaatggctgtcgtcaacctcggccgtacgcatgatcgcggcttgcagacggcctgcttcaccgactcagagtgtgcgttgagcagactctgttgatgcttaggagcctctcggctgaccctctcgtctccttctagggctcaagcaccacaaggacttcctctgttcgggctgggattgctcggccgaggacgaggagcgcgttgagcatgcgatggcagcccgcgagcgagacgatgtcgcaagtcgctttcttgaccggttgcgcttaatctttccatcttgctgacgtcattggtcccctctcgtctctcgcatcgcagaaggacgagcagctgcgcccacttcgcggcctcgcctttgacagtctcctgcctgaaggtgtaaagtggtggggctggctcggcgacgacgtctacgttggcaagtaaggctgctcaacaactagtcggcctgagcaaagaaagatgctgacgacgctcctcacttcagtctgccacgcacgctgccttgggatatcgccgacaactttgacgtcgtcatcccgaatggggtcgccctcgatcagtcctcgcccgtcacgctgtcgtgcgtctttccgcagcgtttcctgatggccgcctgcctgcgtctgacctatcttcaactcctcgcagctccaagctcgcgctcttccagcgccgtaagttgactgcgagtttgctgctcggtttgcctgccttcgcgagcgtcaccacttatgtcgagggccagcgcccgactctgcaaggtgcgcaacaccatcacatccccgccatcctctcctcactgacgcccccccccctcggctctggcgacagacttctccgactacctactcagctcacacgaggcctcctttctgtcgttcgaggcccaccttactaccttcggggccgcaaccttcgctcgagccctcacccagtcgggcacgtttaccatcctccttccaccctcgaaccgagctgagccgaccgctcatgaccgatccggctacctgcggctcatgcactcggcgcatgtcgcacctcatctgctcggaatgttctcggagtatggggttcaccgtacgctctcgtgggatgagccggccgtctttccgcctctctcagctacggccggcgacttcgcctccttcgacggccggattcgcaactcgacagtctggctctaccggctttcaggcggcggaccgatcgtcgctcgaagcgagccaagactctcacagtcgcagaacatcgttctgaccgagtgggcgctcgacaccgctcgcgtacgtattacgctgacatgccttccgttgaacctggacctgacttgcgccttcgtctcgccgactcgcagaaccaccagacgtcaccgcctcagcgtgagtctgaatctccaacccgtcctctctctcgtccctctgacctccattcgtcgtcccctgcagccccgccctacccgccgaaccgcctgcgccagggccacgcactcgtcttcttgcccgaccccaagacatcctcggcgtcgaccgtccgagtcaaggaggtcatctgggacgaccggcctgcgggtcctggcgcggcagccaactggtgggagtcgggcgagtaccagacgcttgcacgcgacttctactgagaacgcacggatcgtcgtcgtctcgagccgccttcgcaccaccccgctgtagctgctcgcacgttttcctttgttgatctcaagactttctagatcgaggctctgaccgagacagcgccgtgcagacatgagggcgcgaacgcttctagaccatcgcgctcgtcgtctgcagagaggggggcgcaagctgtcagtgccgatcagtgacggaggggctgaatgcaagggcgactgaccatcttgcgtccgccatcgacgacgacgacagcccctgtgcagtagcctccagcgcttgagctgaggaagaggagcgggccgacaatctcaggctcggttcctgcgcgcgggatcgggttcgtcgcgatcgtttttgcgagcgggccggtcgagacggcctcggtcgaaggcgacgtcatttcgctgtaggcgggcagcgaccgaggttcagtgagagttcctctgctgcaagatgaagcttgacgcacctcgggaagatgccggggcagatcgagttgacgcggatgccaaaaggcgacaggcgcgaggccagcaccttggtgatctggagggctgcagacggccggagtcagatcaagtgaggtcagcggacgtctggctgtccaccggtaaaccgcgcaggagacgtacctcctgctttcgacgcgccgtacgaggtcgacgagtatgacgggctgaggttccaggcggcgatggacgcaatgttgacgacggacgggtccgactcggactgcttcagtagcggcaggaaggcaatcgtgacaaagtagagcgaggtcaagttggtgtcgagctggacagtgaagtcgtccctgcagtggggggcggccggcaggcaaagaggggttaggcaagggtcccgttattgcgagggcttggagtgtggctaggagacgccggccgagacaacataccagcttgctgaccacagcgactcttcaatctgctcgagcgggtcgccctttttggccgccaccggcaggtcgcgcatgactgcagttgacagcgaagaggcgtcagcctagttaaccgaggccgatcggccggaaccttagagatgtaactgaccgccagcacagttgactaggacgtccaggtgcttctcgtgctgcttgaactggtcgacaagcgcggtgatgtcctccttgctcgagacgctcccctggatgctgcggagccaggcgttcgagggaaccgccgtcagcatcggccagagatctcgatctacaagcgaacgacgaacggcgtgatcgagccggcagagggtgcctgtcccttggcctcgtcaaagagcttgaccgtctcctcgagtgcgggcagtcgccggccagttatgtagaccttggcgccgttagcagcgaagcctgcgcggagggacgagcagcatcgttgtcagctgtggtcgccgcctgtacgtccacctgctcgagggcggggagctggtctgctgaaggccatccccccttccagccgagctgtcgctgagctcttgaacgaaggaaggagctgatgtcttcttgactgaccgtgagcgatcatccggccgaggccggagccgccgccggtgacgaagacgaccttgccgtcgacaccaaagagcttcggggtgagcaggggagcgagattggccatcgtgcgagcagtgcgaaagttgagtagagaggagtgatggtcggttgagaaggttgaggagatcgtcaagctggccggctcttgctgggcttgcccccggctcggctcgaaacgacggccccgggccggcctcatgtcggttgtaaggcgactgtaaaacgattcgtcagccggcttacactcgatcacagtcgagcgaccgttcgcccgcgcgacgcggcagcgcgtgctcgtctcgacgtcgttctcagccctcgctcgccttcacacgacccaggaacctcccggccgcctctactagactccgccgtcgacgtacactcccggggctaaatgtcggacgccttcagcctcctaaccaaggcgctgtcggcgccgaagggagagcagcgccgtctgctcgatgagacgaagcaggcgctcgcgctcgaacccaaggtcatccagccgctcgtcggccatcttctgccggtcgtcaacaactcgcgcggggttgagggcgacctactgcgcggcctctttatcgacgtgcgtacctttcaaggccagctgggtggcagacgtggcacgagacgacgcaagtcggtcagacagcagctgacgctccctctgtccttgcacccccccccggccttgcaggtcctggagatcggcatctgccgctcccagctgccgtacgagatcaagacggcgctcgccctgacctcgatcgagacgctggcgccgctcctccgcctgccgccggcgccatcgttggcggcgacgctccagctcaaggcgctcgtcgccatcagctcgaccctctacccgctcatctttcggcacctctgctcaaacaagaccaacacgctcctctggggcacgctcacgacgctccgcgaccgtgtcctccgctgggcgctcgagggcgtcgacgagcgcgggacgcgagtcccccgcggcgtccggctgtcgagcatcaagttccttcagcgcgtcgtcctcgtccaaaccaagggtggcaatgacccccgagtccgtcctgactttgccagctaccagcttacaaggccgcttgagctgacgatcctcccccgtgctctaggtctacgaccccaacctctccaacatcccgccgggccacccgttcctgccggtccagcagctcgaagcgcagtctctccagctgctcgagttcctcctccggacgctttactcgtcggccgacacgaccctcctgacggccctcctctcgctcctgccgcccatcgtccgcttgcggccgacgctcgcggccgtcctcatcccagccctgaccggctggacgccgagcgcggttgagaaggctggcaaggaccgaggcgatatccgggcgaccgagaaactcgtgcgcgcgctcatgtacggctttgagaggtcagtcttccgtccgataagcttgacagtgtcgaatcgtctcgctccgtcaggactgacctctgacgcacctcccgccaggtcgagcactattgccgccaacttcaagcctcagctgcagcaggccctgctgacgcaaaatgcacggatggaggttgcgtaccggctgcagcttgaagaggcacgcgtcaagcgggcaggcggcgccgtcgaggagccttcggcgaagcgcgtcaagatagaggcgccggcgccgccgcttcctctagcacctgcagcagcgagatccgcgcctggcttcgctccgcccggcccggccgcaccccgacctgcggaaggaccgatctttgacgtccagctcctcacggcgccgctcgtcatcgacctggcgttggcgtcgatcgagtcgctttcgctcccggcgctctcgcacgcggtcggcgtaatccgacaacagctggctcaacccgagccgacgtggtcgaatgcggcgcgcttgctggcgccgtgtgtccgtgccgagggaagggctgagggcgatgtcgtcggcgaggccaaggttgaggatggcgagggcagcaacccgctcgacatgcggctcaacgacggcgagcgggacgaggacgttctgcctgacctgccaccagcaggcatcgacggctcgctcgcttcggcagcagcgatggccgaggccaagcccgtcgtcgccttctcgctcccgccgccgcaagcgctgccactggccaagcggcaagtccaggtgctgaaaacgctcgcccgcctgctcgacaccggggccgagaagctcgcctcgcagcctgcgcgggctgaggatgacgagagcctgctccaaagccgaggcggcgtctgggagctgtggatggtcctcggctcacggctcgtcacgcggagcgacgacgacggcggcgcagagggcgaagcgtcgccaacaaaccagacgctcagtcgggaacgcgaggtcgtcgcggcctgggttgcggacgactttgtggcgaggtcggtcgcccgctctccttccgcttcaatgcctctcactctgccagactgacccccatgtcgacttccctctcctctcgacaggtggcgcttcgcgagtatctggctcaacgaagagtggtacaacgacgctcagattgccgaggacggtcggcggcctgtcccgcgcttccggccgatcctctcgcgcctgctcgcgacgcccgacgtgctcgcctcgaccgccctgccagcattcctcctctcgctgccagacctgccgccgagcacgctcgagacgcttcatttgctctgcgcggggcacgatcgctcggtcggccggctcggcatgcgcacgctccaggttgtcgtcgctgagcggccgccgcttcgtgagggtgcgctcggccagctgctcgagctctgcacgcatcccggtccgtctctcccgcgctgccctctgcgtcgcgcgttgctgaacgctttttccccttccgcctcgcacagacgccggcacgcgcaacccggcgatcgccgcggtccggcagtggacgcccgacacggcgccgatggccgactcgatcaagtcgtttgcgctctcgctcctccggcgcctgcagaaggccgtgacgacgacgacgctggcgccggccgccaagccggaggttgtcaaggccgaggacgctgcgatggccgagccgacgagggacgcaccgccggctgagacgtcatcggtcccggccgaggctgcggcggcgccgccggctgacggcgacgtcgtcttgaacgcggccgaggagtctgaagaggtcgagcatgaggtcgagagtcgctacctgccttcgacgatcgatctcgcgcatgtcgagacggaagttgtcaggcagcacgtcgagttgctgtttgcgctgacgaagaaggtgccggagctgctcgactcgtgcgtttgccccggcctggcctcgccatcgtccccctcccccctctctctcgccctcgctgacgtggtgacccttttttgagagctcccaattatagcagatggggcgagaatagggccgccaggtgcggcagagccgtcgtcggcgattgtcaccaaagccagcccgcagacgggagcaagagggctgacgtgattgctcgccagcacgcaggccggagctcgctccgtaaagtgatgggcgacaagagcgcgacggaagtcggccggccggcagcccctttcttgttggccgcgcccgcgccaccggctgctgttcctccatctcaacactcttcaagcccggacgaccttctgtgtttgcagaatgggctctgatgagcaacaggggacccagctcccaggctgcggcgggaaaaagacgggccaaagctggagcggacgacgagggcaaggaagatcgtaaaattcccgcagctgctggacggccggttgctgaggcgcttgatagcgaggcacacgacggatcaactgaacgccctcttccgatccagtcaataagggaaggaagcaggacatgcgcccaatgtaaagggggcaaacaagcagaacgtttggcaaaaggtttgtgaagagaacgggattcgaacccgcgcccgaagactagcgagttgaagtaatcaaccttaagctagcgccttagaccactcggccatctctccttcgatgttaatgactccaacaaacattatatgattatttcatcaacgaccctctcagcttgccggtctccgagctcgcctgcttcctccgaccatcatccccagaacctttgccccaccccttcgtccagcagcaggtcgtcagctccttcagggatcctaggggaggcattccatgatcctcacctccctcgcccgctcagcttcggtcgatgaggtgctcgccttcctcaggctgcctgtcgacggccgcctccccgcccggctcgcccagcagcgactccgccctgtacgccgcttcctctcacaggcatcgcttgcttacgactagccggacagcactgacgtgtctcacctcacctcttggccaggccttcttggttctcgccggcttactcgcgtttacgctcgccgggctcgcgctcagccccgagctggcgatcccggttaatgacaaggtgcgcgcagccggcttgcaacgagctgcccttctcgacttgcagcctctgagagctgatacctgctgtccttgacctgctggctctgcgctagatcctacatgcgctcggggttaggaggttttgcgtcgctggtataatgcagcttcggctcgactaaccgcctccgctcgcttccactcccctcgcaggatggcctcttcacggctgctgtataccccatccttttgccatcgtaagccctgaatcttacgcgagagctactgcgccttcgctgctgacctggcgtctcccgtatcgccgtttcaggccatcgccgccctgggcaacatacctgcccctactcgcgacgaccatcgccggaggcctgctcatgggtgtcggctcagagttcgcccaggcgtccttgtcggtgagtgcagagcagccctgttctctgtcgtcagagacaggtgtttatccgcctatcacttcccgtttcagcgccgcgtctttgactggggtgacgtcgtcgccaactgcgctggtttcgccgtcgcactcggcttggcccatcgcttcgcaggaccctggcttgcagatgcgcatgaaagggagccaggcgtgtcacttccgctagcggacgcgcagagacttgtatcgtgatgttttcatagatgtgacgaagccgttgagccgagccgacaggattgtcgcaatgagcacagcatgacagagcgagaagtcaatgctggccatggcatctttccgagagcccccttgtcggtgtcgttcagatcaagttaaattgcatctaagactacagtcgaaaggagaaggagctagagtcctacaagcggcggaatgcatctagtcgacctcgtcgctgacctcgggctcggcctcgactttggcgaccttcgtctcggccggaggtgtcggctcgacgacggcgcccttaacggtcggctgcatgtcgacaatctggaaggcgacccggaagtactcctttgtccgagcccggttgcagcaggtgaaggtgacgggcctgagggtaggcatgggacaagagtcagatatgatttgctaaggtgaaggcgtgcttagcacgcactggccgtcccagtagtccttgagcttgatgtggaagccgatcgacgggatgccgacggagaggtcgttgaagtcgaggtaaccctggacaaagtccatctcgaggaggtccttaataagcagaacgagtaaatcacggtcagcgttgccgatagctcaaatgtgggcctctgtgcgcacgttcggcccgagcgtgatggccttgcggttgtcttcggaggcgagccactggcggcgcttggccgtgtcccaagcgccctgctgcttgagctgctcaagctcgtccgctttggccttggtctcgggtgaccgggcgagggtcgccatgaacgagtcgaccgtcgtctccttcagcggcttgagcgtatcgtccaaccaggctggcagggagggcttgtcgagcggcgtcacggagaggtaaggggctgtcgagacgagcggcgagctgccgcccagcccggtagcgtgtcagcctgcaaacgtgcgaaaagtagtctcgagtgtgagctggacgcacaaggcccacggcttgtcggcgtagaagtcctgggctagcgttgggtcgagcaggcggaggaactgcgcggagacaagcagagcgtcagctaaagccggcgccatgatctagcaaatagatggacgaatagatggacggaccttgagtgcgatagaggtcccccagggcaggtgatcgcggatcggccgctcaaaggtgttgccgaacaggacgtcgtcggctgcgcggagagcagcccatgcctaaggtcagccatcggcccgccgaccgagccgaggcgttgcccgcatagtcgcctgttcaccgttgacctcctcaaggaagcgaccgcggacaaagatgctccatgtcttgccacggcgctcgccgtcgtcggcaaagtagtcgtcggccgggttaagctttggctggccgtcggctgacacgccggtaaagtccttgatgcggacgaggatgtcgccctcgaacgcgtcagagcggatgtgcgtcggctcggtcgcgttcggcgacgtctgcttcggagctgagccgggcgttgcgacgtcgacgcggatcttgatcttgtcggcctggtcgagcgggaaggcaagaggcggaggtggcggcgagatcagagggaggtcgagcggcggccggtcagcttgagctcgcctgacctggccagagcgcgatgcgacggaccatagcgattgatcgggtgtctgctcgctgcggtctagtgaggtgtcgttgctgctgatggtagttgagaagtgtccttgctgcgagtcggtcggtcggccgggtgaagcagccgtcgccccttcgcgtcatagccgtcgagcagtgttgttcccacgccaggcgcagtcgagcctggcctcctcctgttcccttgggcgccaggccgaggggagcccgcggccaagcccgaactccggctcggattcgccgaccaaccgaggagggccagagcgcccgagctttgcccagcctgcactgcaggcaggcagggaaggccagagcaggcaagcaagaaggagtgcggagcgaccgccgctgacgcaggagcccgctgccgctgcagcaagcccttctgactgaccactcgtccgtcgacctgccgtctcgaagctcgctagctctcagctttgcggcccgacgaacaccgtccggcgcccggccggcccggctggagctttagaccggcagcggaggggctgcctcggagctcttgcagttcgtttttgtgcgcagcgtgcgaccttgcacccgctgccaagcaactctcgcccaacggctctgcgttccctcccttaaccaagcacgctgggggaggatcatctgatcaccttgtccgtccgtccatgccttgatcgttgccgcggcctttcccggatcgggtaccttcgcacagcggccggctctcttaaagcgaagggtttgacgctctccgcactcccctaacagcgctccatctctttgccctctctctctctcgcagccctctacctctcttcaagcctaccctcaccaccccctgaccctagcagcttccatcatggccgacgtcgagaagcttgccggcactcgtcctgctcacacgaatggctcggaccacacgctcgaaggcaacctcaccggtacgacggccggccacaactcgcaccttgcccaccgggcggtgacgcctggcggccacccggtcgacacgtcgcagcctgcattcccagtctaccatcggaaacttgcgaatccggctccgctcggcctgttggcctttgcgacgacgacgtttgtcctgtcgtggtacaacactggcgtccgcgacattacggtcggtccttcttgaagcctcgtcactcgtcattcgaacctccccggctgaccttcgatccctccttgcagcacccgaacgtcgtcgtcggtctcgctctcggctttggcggcctcgcccagctcctggctggcatgtgggaggtcggtcgtcttgcttcctccgtctgtctcgagcacggcgctgaccctccctccctccttccactctaccctccctttagttcgcgtgcggtaacaccttcggagcgactgcattcacggcgtacggcgccttttggctgagttacgccgtcgtccagtggcctggatcgggcatcatgtcggtcgactgggcgcctggagagcttgagaactcgctcggcatctacctcatgggctggttcatttttacgtgcgcaggaagactctctctctctcgtcctatctctgtcaccgccctcgctgaccgctttctgctgcttcccctcgcgccccagcttcctcatgtggctcggcaccttcaagtcgtcggtcggcctttgcggcaccttcacgctcctctggattaccttcctcctgcttgcctgcggtgacctcatgatgaacgcgacgctcaagaaggccggcggcggcatgggactcgcgaccgccttgtacgtgcaattcttgcaccttctccttcgacaggccagacgactcacccgctccttcctcttccttctcccttctcctcgcgaatccttccttcccgccgaaacagcatcgccttctacacgggcattgccggcatcctcacgcccgagacgtcgtactttgtcctcccggtcggcgacctctcgggcaagtcgaagcgcaaggcggcctagacgcgtagctctctctcccccttctcgctctgtgtcctcttctccatcctttgtagctttctctctccatgggccctcctccgctcgtcctctgccttccctaatgtcaatgacttccaccttgctagcgtgtgtgaaagctaggggtgacagaggtggatcaactcgttgcaggctggatcaaggcacacgtcgccgcgctgcgccgacgtgcgcccgagtcccctgtttctcagcgcgccgacgacgacctatcttgaccgacctctctttactctagctcagcgctcgtcgagcgatactgcactcaaaacgacttattccggccggccagaggtggtggacgaggtgggaagggcgagcagctgttgaggtcggctgaaacgccccgcccctccgagcgagcttcggcagcatggccggccaaagatttgggcccgcagtcgacccttcgacgaccaactccctgagaccctgccgtccctctcgcgcaagctcgcagaaaccctactcgacagcaccatggccgccgagcagactgcccactcgtccgtcctccaggcgtcggcgccggtgcccgactcgcaggtgcccgtctcaggcccaaacttcgaccggccgcactcgctcgacgagctcctctcagcctactcgaccatcggctttcaagcgagcagtctcggcaaggctgtcgacatcgtgaacgagatggtgcaccgcccgctcaggtctggaatacatgaagggcccgagctgatgtgcccggctttgttctgctgttgcagcgcgcctggcgggcaccgccgcccgagcgggccagcgaggacgagcaggccgaggccgcagagagcaacaagctcgaggaggacgtcaagccgaatccttactacccgcctcaggaccgggcaaccatcttcctcggctatacgtctaacttgatctcgtctggcttgcgcgaggtcatctgcttcctcgcccggcacaagctcgtcgactgcctcgtgacgaccgctggcggtgtcgaagaggactttatcaaggtcctcggcaaaacgtacctcggcgagaggggcttcgaggagaagggcaaggacctgcggctgaaggggtgcgtgtccttttcgcctcttccaaggcaagcaaactcggggctgacctttgccctgtcgaccgcgcgcgcagcatgaatcggatcggcaacctgatcgtccctaactccaactactgctcgttcgaggactgggtcctgccgatactggacgccatggtcgtcgaccaggagaccaagggcgtgcgctggacgccgtccaaggtcattgctcggcttggcgaggagatcggcaagctgccaggcggcgagacttcagtgtactactgggcctggaaggtcggtcgccttcattggcgacagtcttagagatcatcatgtagtgctgacgagctgccccttctaatcctcgcccgcagaacaacatccccgtcttttgcccggccctcacagacggctcactcggcgacatgctctacttccactcgtacaagtcggaacacccgcttgtgatcgacatcgtctcggacattcgctacctgaatgacatgtcggtccgggccaagaaggccggcatggtcattctcggcggcggcgtctgtaagcaccagattgccaacgcgatgctcttcgtgcgtcactctgcgcgcttcgttcatcataccgacgtcctcgactgccgactaacacctgctctcttttgctcggctgccatagcgtaatggcgccgactatgccgtgtacctgaacacggggcaagagtacgacggatccgactccggcgccaggccggacgaggccgtctcctggggcaaaatcaaggccgacgcacgggctgtcaaggtacggaccgagcacagactctctacaggtggtactagcagttggccgcttcgactgacctgctgccccttggcaactcaggtctacgccgacgcgacgctcgtcttcccgctcctcgtcgcgcagacgtggggcaaggcgcattgggccgcgcagggctcagggagcagcacatcatagaatgcatttctcgcaaagattcggggctgcttgcgaagaaggattagtggagaagcgaagtcgtctgggtgaagtaaagggtacgctgcgccagccggccggagttcggggcgcctgcgggtcgtccagccgagatgctcgacctcccctttctcgacgaccatcatctctcctcgcccaggctcagctcaatcgccctgtcccttcttggaatcactctgcctgacagctcggtgtcctttcatcctatcgtcatcgctcgacgttaaattggctctcgcaagagacggcgttggcgtcggtgcgtcgacttgcacttgagctcgacgctgccatcacccagagctccctccgatgctgacctcgcatctttcctctgcgcaggctcggccaggcctgagcacctgaagagctctttccgtcgactgagccccggcggacgatgtcgttcctgccgtcttacatcacttcaacccttcaaggccaactcccgttgccagcgcagctgctctctgccccggtcagcgactcgaagctcgtcgtcaaggtaacgcccctgcgccgctccagctttgccggcgagctcttccaagctcagatcgcctttgcgctcgagaatgctcagtcgagcgacgcaaaggaagccgccgacggcgaggcccaggccagagctcaggccgccgccggcaacctcctacgccgcccctccgccccggcgacgcctactggccgagggtcgcccggcaagggcacgtccccgttcaagccggcccatcgctcagctcagagcctgtcgaatccattcattccctcgttgcatccgccgccagggccagcaggctcgccagcgcgctctgtgtctgcgtcgcatgcccagcgctgcccagcggccaacctaccggccgggcatccgcacgcaaggaagccttcctttgcgccttcgccaaacggccaagacggattttcggccgaggacgtcccgacgatgagctcgctccgtcgcacgtcggcaggctcggtcgcgagcgccgcaccgcccaagtcgccaatgtcgccgctctcttccatcctcgaaggcgacgcgcagcgcgcagcgcccgaagacgaggcggtcgacggaagcgaggacgtcttctcggttccgcagagcggtgggattgcgcgctccgatgacggagcatcaccggcgcagtcctttgggcggcccactcgaccgaacggccatatatatcgctcgtccctctcgatcgggcacggcccgccgccatctccgtcgcccgcctcgctagtatcggccacggctcctcctccgcccgttccgagcggctcaggcctcaccatcacctggtcacacgtgcagctgcaggcgacactctcgccgtcgccgcagcacttgccgccagaggcgcttctcccactccggcaggcgctccttgactcgtcgactcttggctctggctctctcccgtcgtcaagccggtccagcggcgatccgtctgcttcttcctcggccggtggctggttctcgctccccccgccgccgcgtcacgctcgagcgccgagcttgaccagctcgcttttcgggatggccaagacgatgtggtctggcgccggcgtcgagaacacgggcagcctcgaggaggaccgccggcggatgtgggagcggaccgtcaaagagattccggtttttgaaactctcaagagcatctgcggcgtcggcctcgagctcaaggaggcgtcggccgagcaggatccgactgacccgctcaactgctagtcttcacccctcttcgagagaccgccgatgcggatgctgacatgcaggtcccctttccatctgcagtcacctactccgtcaccctccctgcaggcctgcccccgaccttcaagggcaaagcgctgaagatctcgtacgcactcgtcatcaccgtcgaggtcgagtatccgctgccaccgcttcggccgggttacgatagcgaaatcggcccgcggaaacggaggacaaaggctgtgacgctccgagttccgatcaacgtctggggcagccttgaaggtgagtcggctgagcctcgcgaacgtacattcgtccgctgactgacgctctcaaccgattgctttgctttctgacagagccgacaatccagagtggctacgacttgatgcggccaactatccagcggacccagactgcaaggctcgagcagtgcgcgccgcccatccgaaccttcgcagcgcaggactcggcggcaggcacgtcaagagagaacgaccagctgctgtcctcaggtacgcgcccattgacgcggacgcctctcgaaccgaggagctgatttgagaccaccaacgcagcccttcccgccacgcgggcttccttcctctcgtacgcgacgcacctcttctcgactcttccatcgcgcgagcctccgccactgccgaccgacgtcaacggtgtcagtcggcccgagaagcacaagcacacgcggagccaggccctgagcccatcgacgtttactcagtccctgcctgaagtccacgtcaacgggcgcagcccgtcaacggctgccctcgaggacgaggcgcagcgagtgaagcggatggaacgactggccgatctcgatcggacggccgaacgcgatagcgaggacattgtcgatgacctgcttcgggcgagcaagaagggtacgttcttctcgacgtctcgtaggccgctatccccgcgtcctcatatcctgctactgctcgcttcactccagcctcgtatgacatcgaaaaggagggcgaggtcgtcgccgtcctgacgctcgtcaagtcggcctatcggctcggcgagacggtatcgggcgtcgtcaccttcaacgagtcgtcgtgtacacggcgtgtcctgaaggtgcgtccgagagcgcgaagctgacagctactcggagctgacttgacgtgtctttcaacccatgtgaagttctcggcgtacctgcagacgcacgaggtcgtccctgcctcgctccatgcgccgaccggttccaagctcaagccgtttgtccggacgcatgccgtgcatcactcggcactgacgccgcagacgacacggatgccgttcagcctcgatctgacggcgcccggctcggccgcgctcggtggcgctctctcgccctcgtttcacctccgtgcgggcgagtcggccgccggttcgcggccgggcgggctccactggaaggtccacgtcgccttcctcgtctcggctccgtcacgcacgcagccgacgagcgtcgaggtcgtcggtcagtcggcgccggctcacctgctcatcgccgatccagcggaggagccgacagacacgacgcacgagcacctccgaccgacaccgagcatcgcgcccgtcgtcgccctcaccgtgcgcgacccagcccggcccgaggtcgagggcgtcctctggcaggcaatgcggaccgaggtcgtagagtgcgacatcgacttagccatgtttgcgccctcgcgcctcggcctcgccgcgctcaacgtgggcgccggcgagcctggcagcgcggccgacgacggcaccgtctccttcgtcatctgaccccctttagagtggcaatctaccatgtagccctttgtgttgtacgacgtgcgcagaagaggtgcgagtccaagctttcgttccactcctgagacactcgcaaaggccaggctcgctgcgagccgaggtgactgggatgcagacatgggtcggaaagctaagtagagatcctggaggcaagaagatgagacggaaaagcacatgtcagtcgctaccctacaagcggcgagagcggtcggcggtcgggaagcaaagtgaaagtgaagcctcagacaacgcaaagccctcctccaaccggccagctcgagagctgacctgacgagggagagcgaagagcgccgcaggctccggagagcaggtcaagtcaacgcttgctcgacggtccctctacccccggagggaagcgatgaccgccagcagctcctcttgccactgctgagggtgtcatctttggcgagactgcccgccgtcctgctggagggctggaagccgacggacccggtcaaacgggtcgtctggtccgactgcgacaggcgagcgggaaggctatcggggaatcggaagggagcgaactcacgtgttgaggaagcgcaggagatggcgcgctgcagacgtcagccgagcgctaaggtcctcgccacctcctgccgccgtccgcgttgatagcaaggacgagagaagagcaggtctgcctgctgctgcaagactgatgtgagaacagtgcctgcaaagggtggtcaggcgggcgcaagagacccgtcgagtgggcaagcagcgtgatcgagcgagagtttattgagggaacggctccgtcgggcgctgcttctttgtgcaggggcctgccccagcggctgggtcgtcgtctcgcaatggcacgacaacagggatcggtcgaagattgttggtgactcgaggcgagaggaagtagtgtgtagtcggtcctgccgagaaacatccttgtcagacctggtcggtctgacagttcccagcaggcagggccaaagtgttgtttatagccggccgggcggcgcgtccgacgaccagagaggaggtcaggcggctgagggcgcgaccggagctggtcgaccttctgcgacaggctgggtcgtctgttgctgcaggtggaaaaggcagcagcagggcgtgacggtcgtctgtccgatcgggatcgagagcaagagaagatcgggagctgacgttctggggtgggccttgttgcaggaccgctgcgcctcttctgcgcgagacgatgaactgtcgtcggcaggccaggaccgaaaggggtctgccgtcggcccgcctgctcgcttctcttctgccggtcgaccacgacccgctctcacttgcagacagacagcctgccagaccgacctgccccgtcgacagcagaccgacccagctcgaggtgcgtcggccacagctagcccggttccgcctgctgctggagcgaccctctttcggccgctggagtccccgctcgttcatccaccacagcgggcagccctcgaaggagcagcagcagtagccgaagggcgtcggtagcgagcgcgagcgacagtacgaccctgaccaccgccgactgcttcttgccctcatccgtctctcaccctcgccgcccgtcctcctccgcctcccgcagcccgctcgacgaagacgacgacgacgccctttcagccccggccacgcgcctctccggtagccgacccgcccgccagctcaacagcgcccgacggtcgcctcgcctcgcctctcgcggcctagacgaacaagacgggcgcatcacgcggttccttaccttcttcctcctcgccggacgccagcgctaccgctcattgtgcgcgcgcgcccgcctcctctcgcctcttgacgcggccgacgcctcgctgcgcctgccccgttgcctttgagccctcggctacggcctgcctcctcgtcgtcgcctcgctccgtgacatccccctcgcctcgatccgggcatgtccctcgctccgaccgaacctctcgccggcggcacgcgcttctgggaaaacctctcgctcgagtcgctcgacgaggctagcctcgctcacctcctcggccgggaggcgaccccggccccggcgcccggaccctcagccacaacacccgccgccgccggccaacgtccgagcaccagcagcagggcaacccagcagcggccgacgtcaatagctctgccctcgccgccgcggatgccagcggcggccaagccggcgagcccgctctcgcccaagctctacggctggaacttccttcggaggggcggagctgcggcggcagcgacaaccgcggccgcggctccgacggcagcctcttcgtcgtcgtctggcaagacgggcaggagcggcgtccctccgaatcggacggttgaagtcgcctcggcgcccaggaagcatcgctcgagcctgaccctgcccgcgcagacgacgttcgatctcgaagaagctcgcctggtccagggcgccggcgggggcgcgtcggctctggccgcggaggctggtgccagccccagtggcgacgctcctgccggttctgcccccgctacctcgtcttcgacagcccatccggatcgacctcaacgaccgggacagtcgcgcgtacgtctcacgcctttccgccaacggcaactcagccacgaccgcccatcccggacccgccgggggcagccgactgacgcgattttccctctgccttcgtctcgtgaccagtcatcgacgtggaccgacagcctgccgactgtccggaccctcgccctcggccaggagtcgtcagcgccagttgcgccaccacacttgacggcttcatcgtcaacatcgtcgtcgagaggcgtcgacccgttcggcgcggttgaggacccggtcctacttgtcccgatcgtcgcccctcggaaggacaacctcgcccgcggcggtcgcttcggtctcttcagacgcggcagcctcagtccgcgagtagagaagtcgggcttcaccattggcggccggccgagcggcagcggcagcggcgagggcgatgcgaaggagcgccctcgcaagtcatcaaaggagagcagcctcgataagcccttcaaacgccggcatcgcggctcatttggctcgctctcatcgctcggcggccagcagcggtcgagctcgcccgtctcgtggggaccgagggccgaggagatgcgacacgtcgcgctgacgacggcctcacctccgcccgagggcgtcgacttcgagccggctagcccctcgtctgacgccgcctccatcaggagctactttcctgtggccgggccgtcgactggcgacgggcaggcacggcggtcgtcccttccacggagctcgctgcacgcagtggccgacttgcaccagctcgctcacccgtcggcgaatgggttgagctgcagccccgtcaaccagagcccccttcgccagtcgatcgacgactcggatcttccccggccgcacatcacctttggcgcccagcccgcgccagcctcgccgctgcggacgtcagcgccgacgttcccgccgtcgcacagcgagtcgagcctgtcgctccagacttccgactcggacgaagacttcccagctcgctctggcgcgcgcaaggcggtcaagagccaccggctgcgcaagccgccggtcaagattggtggccagcgcgaccggagcgtctcgcccctgcgctacgcgagcgatggtgaggcctttgacagccagggcgaagacggcgctcgcggccggctcaaggcctggcaatggtggaagcccaccggcgccacctcacccagcgccgcacttggcggcaggcctggctccgccgccctgacgccgacgtcgtcaacggaccggccgcccaaacggggcaagaccatctcgtccacggtggctcagaagggtttcaaggtcacgtcgcggccgctctcgtcctttgagccatcggccggccgccagacggccggctctggcttcccgcctacgccgcccacgacgagcgctccgacacccgctgccggtcgcagtctggcgagcacgcgcgagccgagcccgagtgcaaacgactcgctcctgactgcgagtcggccggctgctatcgtccaccaggcgacagtattgccgagcggcagtgtcagtgtccgcgcatcggcctccttgcgacagtggcagccgccggcgaaggctgcccctcgcccgccaaacggcgaccaccgagcgcttccgccggtcaacacggccgacgcggcgagcacactcgtaactgaagcggcgcgccaggactcgctgtcgccgccgagcgcgtcgagttgcgaggcgccgtcgccgctgtcggcctacgggacggcgactgaggccgacgaggggaccaccaactcggagcacgagctcgcgacgaccgaggacggctgctaccggttcgccggccaacaaaatcaccacggctggcagcctcgtgtccaatcgggcggcagcgagcgcagctgggacggcgattcgatcctctatcgcgtcgagtcgcgcctcggcggccctccggcgacaaaggtctagacgtcgcccaagagtctttcggtctatttcttcctgctcgcgcgcctgtacttcgtctcgccgtcgctctgtcgtttgtacgctcgtcttcccgcctcatggaccgcccctcctatggactctactctgtacgctcctcgatctctcttcatttgatatcatgcgttattccgtttggttcgtgtggtgcgtgcgtgcggtcagagcatttggtggggcgtcgcgtagagggaaggtcgtgaggaaacgtgggtcttgaggaagcgtaggtcttcagaaattaggtgtggaggaggacctggatcttgcgatcacggaaggcgaagacggccgacgtgaagtgcccgagtgcaaggaggatggcgatggcgagggaggcgttccagtagtcgcacctgtggacgacaagagtgatggtcagcgcacaggcggcaagtggagggaattgtggacgacgtcctgcgcaccactgctcggatgtccccgccgggcacgccggaccggtcatcgctaggccaaatgtgctcgcccagccgagcccgagtaggacgtccgcgacgagcagcttggtcagccagcgacgtgcgaggctgaactcggcccgcgcggcgaggacgtccgaaaacgaggctcgcgggtcgcgcttgatcccgtcgtcaacgtctgagcccgaggacgatgaagacgacgagtcgcggcgacggcggcgacggtcgtgctttgaccggcccgacgacaatgccggtgcgaagaagcgcgggtcgacaacgaggttgatggatggaggcggcggcggcccgtggcgacccttcttgcgctggccgcctggcatggcaataggcaggatcataccgcccgacgggtgccggacctgctcgacgagctgcttccgggcctttgggaggcaccagagcggccagatggcgtgcaggacgagaaaggcgatgaaggcgagcgttgcccagacgtaaaggatgaaggcagggatcgtcgacttcggaggcggcggcggggcgatgcccttcatgaactgcaggagagggcggtgcgtaagttttgcagctcaggtaacctggaagagacgtaggagctgaccagggcactgtagatcagaaggaccaaagcgaggagagagagcaggccttcgacccagcgtagagctgcccgcttgcgcgggccgcccgtgacgatccggccgcgcatgtcaaggtcgccgacgcggagcggctgcgtcgctcggaactcggccttggtgagccctccggccgcgcggtcgtccccgaactcgcgctcgagctgccggacccgggccttcttaactgcgttggccgcggcagatctcgaagaaggccgcttggccgtcgggcccggcccctcgtcggcgaggtcgccagtcaggccgccggcccactcctcacggccgataccctcgtagctggccgcgtcgtcgcctttgaaccacttgcgcgagaacttggggaacgatttgagtgcctttggcgtcagtcggccgtccgtctcgtcgccggcggcgacgtggtgactggcgcgggcgtcaaagagctctgccgcgaaaggctcgtaggttgggacgtgtcgcgcagggtacggaagctcgtaatcgtctcggggcgccgacgactggtaactctcgagcgagcggaaggaaggcgcggggtcggctgctggaggaaagcgcgaggtgtacgacggcgccggcgagtcgagcgtcgatgggcgggaggcaaagctcggctggctggcgtgcgacggccgagaggcgttcgtcgggcgactgggctgcagctgccgagcgtaggtcgcgctggagcagagacgggcagacgagaggagcagcgttaggttcctccggtcttgttgttcagtcagagcggcgacaccgacagatccaagacctcgactgacgcgtccgactcggcccgcgcatgctgcatgcttccgagctggccgccggcgaggatccgacgccagtcctgagacaaggccaacgcgccttccctgccgttccctccgagaacgggcgagcttagctctcggccttgccgagcgtgatcagttcgaggcgacgccgcccgagggacgtgcggcgctctcgccgcccactcggcctcgcggctccatcgggtgagggcctcgaactcctgctgaatctcgtcgagctcgtcgttggcttgcgagcgtcggtcgtcgtgcgaggcggcgtaaggcgtgaagtgcgggtcggggcgtgaggtgaaagggcgagcagcttgctggccggctcggtcgttgccgtcgcgcattgctgagggaaaggatgatgaagaagagtggcctgtcagaaggtggaagcagctagtggtcgacgtcgttcgcaagagaaggcgtggttgcctttctctttctttcccgtctgtcggctgctgctctggaaaggaggcgcgagtgacgacgaggccggcgacaggagcgagggcgactgcgcgcggccccggtggctgactcgaccttgcactaacactgcaacctgctgacggaagggagcttctcggggaaagatacatttatcaagcagagcgacgtgcagacgactgcgatgaacggcagggggcaggagcaagatgagaggagaacaacaaggggggaaggggggaggagtcgaccagagcgagacgcctgactttaaacaacgacaggccagccgctcgagaagtcgagcttgcgaatacccagcgacgacgtcgtgtcagagtaccagtggtggtagaggtagtaggagccgtccttcgtgtccttgtggacgacgccgccgccggggccaatgacctcgccctcggacgcaaggaggagcgttccgccgccctcaagcgcagggacgccatccttgtcaaagtaggggccgagcgggcccgtcgtcgaccgggcggcgcgcgtgttgtaggtcgacttggtggccgagcagcacttgtcccacgacatgaacaaccaccagtccttgcccttcttgatgatcgacgggccctcgaccgcgccctcgacgctgatgtcgcgctgggcgaggtggaccggctcggcgccgtggagaaccttgcccgtcttgcggttcagctcgacggcgtagaggcccgaccagaacgagccgaatgccatgtactcgtgcgagctgaaggcaggaatccggcttcagcggcgggcaatgaacgagaaggactgcaagaaagactcacccgtccttgatgtaagccgggtcaatcgagttgtaggggtcgcccttcttagacgagaagatgaggcccttctgctcaaacgagccgggcatgccagttttggactgcagaagagggcaagcaggaggaggacgtcagaacgagggcagagcaggatgcgacgaaggcgcgacgtacggtggcgtagaagatgcccgagtcctgcgagccgaagcttgaggcagaccaccggaggtggtagacatcgcccttgcggtggatgtcgggcgcccagaggtcgttggtgtctgtcgatcgggcaacggcgtcaatcactgaagggtagggaggaggggcgcagcagatcgaacgcactgttgttgaaggcaccgacgccagcaggcggcgtgccggggaagatgttgccctcgtacttccagtcgagcttgtccttgctcgtccggatctccatgccctgcggcgaggtcgagacgagcaggtagctgccgtcgggcttctggacgacgctcgggtcgtggacggcgtcgaagcgcccggtgagcttgagggggcccttgaccggcgtcggctttgcgagggccgcagtgacgcaggcgaggaggggtaggaggtgagtgaagatcatcttgcggtgtggggaaggggcgatggaagggtagagacggtcgacggccggcaggtcagctcctttaatagggagtcagcgacctgtttgggccagcaggcatgccgctctcgtccgcgggagcagcagcagacgtttgacggacgagatggccaaaagacaagccgggcgttggcaggcggacccaggtcaggtcgccttggccgggttgagcgggcgagctgcaaaggccagcggcggcggtggagtttcgttcgaaaagggcccgatgctggctgttccctcgcgaggtcgaagcccgtcctgcactaggctgtaatggccaacgctcgtcgcgcgtgtgtgccctctccgccggtgctcggtcctccgcatcgtgatgtctccctgcgtcgagatcgtccggccggcgaagcgacacagcctgatgcttgagcgcttggccgctctcgaccaccgcggccagcgcaggatggtcgtccggacgatcaccggcagtcgcggacgagacgaagtcaagctgagcctgttgggggacccagcaggataccggtctgaggtcgtgctggtcggcggagcaagcagcttggcgagtcgtcggccgagcagcacaagcacgccctgcaaggcctgcgcatcttcgacccgggcgagctcgtcgatcagcacgcaccagccgaccgagcgccggtcgtttctctgtcaaggcgattccggaacggacattagggagcttctgtgcgagacgacttcagccagcttgcatgctctgggaagacgtggtcgtgcaggaagcagctggcctgacatcgactcgcgcgagctccggcacgcgcagaactccgcccgcccgcccgccgtctcgcctccttctgaccgccagcagctttgccctcacgccagtcaccttcaacagctagcaagcagctcacgagcgtcttccccttgctcgagttgtcctcttgcggtctatctcgggcgacacaaccggtccccccaaaacctccttcccggacgagctcttcgacctgaccggcctccctcgcgaccagagctgcgcgctcctcctttcaggctggctcccgaactctggcctgccatcggaccacaagcctcgacgtggtgagcagacctctagcgcgcgcttgatggtcgaggctgacctggtctggtaccgacgcaggccggtatggacttcgacgacccgcacgccccgctcgacccgacggcctccggcagcggcggccctgctcttgtgccaccagctgccgagccaaccggtccagccagccggcctaaggtcctcagcaacgccgacttctacgcgtctcacttcgagtcacatgtcgcctcggtcgcagcgcacttccgaggggagacggaccagaaaccggggcaggggccggccagacggcgccgtctcggccccttgacgtttccgtcggcgcacttcgcctggtcggaagccgacaccaacctcttttatgcctcgctccgccggcgcagcaagtcgtggcccgagctcatcgcggccgacatggccggccgcaagagcctcgtcgaggtgacggcttacctcgcccggctcgatggcgcactcggcgccctgccagacgagcgccggaagcagcttcgagtgccgcctctacccgcgcgcgaggtcagcgagcgctgggtcgagtttgaggaggagatggcgagcgactacctcgatcggtcgcgcaagcgtgagcgggccgaggacgccggcgccctgcaggtcaaacgcgacgagctgttcaagcaggcaaagcgggcccttcctccgccaccgtggacgcttccaggggcagggcccaaaacgtggaagcagcaacgtcggcgcgacgcccagctgaaggctacgcgtcaggagctcgagaaggagtttgcgcgcgaggactggctccgcctgctcgaccaggccaagtcagaggcgatcagcaaggagatcaagcatccttcgcggcttggcgtcgtccagcccggggcgtctgacgacgacagcgatgacggccaagaccagccggccgcagcacagcctgtccagcctgtcgaaacgccctcgcaagagccgccgcctgctgtcgtcactttcgaagacgatacgcgcagcgaccgggcttcatcaaccggagcgaagaagaagagtgcgcgcatccccttccacggcggccgcttgcggcgcgaggtcgtcgttatgcgtctcggcgacatgctgcacgacaaagggctcgatgtcctctccttcaaggttgcgcaccggacgctgaggtacgaatctccctctttgcgacccatatcatcggcgctaaactttgaccttcggccgccaacagctacaacccttcacccggatcggagccgatccagattcccctgccaatcctgcaggatggcgtcgctctcctccgggcccacgtcacgcgggtcctgcagcgtacgctggcgctcaagtcgcctgaccacgacagcgagctcgagcgctcgtccgcgtccgattcaagggcttcgtcgagctcccgcctgatcacgggcaagctcgtccgggaagccatcgagagcctccaaggcgcagaggacgaccactgggtcgacgactttagcccatcgccggtgtcgtccgccgaggccgcgcccgacctgtcgaccccggacctgcgggcctctccagagacacaagtcgtcccggagataaacggcagcggcgacgacgaggaaccgcctcccatcgtctcggtggcctctgaacccggtcgagtccgcttcgaggccgggctgccgcctccgaccgagccccttcgaccgcttggcgcgccgacgatctaccgccctcacgcacggctggcgaaggatcagccttaccccgctggggtcacattcgtgccattcgatcccgagctgctcaaaccggcaacattctttacagataacggtccgacggacgccctcgtccacgtttcggacgacgagatcgaagccgaccgagtcaagactgaggacgacgaggccgacgtgctgcaggaccgtgccgacctggcggccgaccgcgcgtgggaggacggcctgtggtcgacaatccgagctatggaccctgacggcctagcctggctgaccctcggcagcctgatcgactctgagaacacccgtgcgcccagtactctctcacactccttcgtggcctggcctggcctggcctgtgcgacgactgacgcctctcgctcactcgtctgcgccctttagaaccggcatccgcgtccgtcctttcggaagacgatgacgacgacgacgagcacggctcggacgacggcatgagcgacggtgccacttagcatggcggcccttctctcacggcctcgtcgccctcgcggttgagcgcctcccatctatgatctccttcttcttggtgcgggctggtatcgtcattgagaggcacgaagcgaggggtatgaaagcgatcgtgggtatgcggggtcttcaaggggtcgtcggggcaggaggggcaaagcttggggggcgcgtccgtgggagggcgcgcagcaggcccaagagagaagagcaggcgcgtgttgagccgccgcagagggagaccccgcgctcagcaacccaccctccgacagcgacgaccaacggcaggcacgcaacgacacggcatgcgacgcgctggaaggaaggccagcagcacgtacgccgagggcaggagagctgacccctggacatactgatcagcaggagaggctggcttggacgaaagcgacccgacctggctgaagacccgactcgcagggcacccgcggcggctagcaggtcccgggatgacgctccctcgctcccagcttcgtccatcgggccatcgagagacgatggtctggcgggcgagcactgtctcctctcttcctgcctttcaacgaccaccaccagcgcctgctctgtgctttcctgtctttattccgtcctcgctttcttgtccgtcctcctgccgccgccgccgcctacctacccccctgccagtgccgccgtccccgccgcgcagctacctcgcccgccatgccctcgacccgctcgtccgacaacaccgacgactggcgctcgtcgccgccctatgcactcgccgacggccgcgaggccagcgagtacaagaagcacacggctgcctgcttctgcggctcggtctgctggggcttctccgagtccaagccgctccaggcaaagtactgccagtacgtgttacctgctgcacatgctgcgccttccgatctctcgcatgactcctccgctgaccctttttctgctgcctgctcgacagctgctcgacctgccagcagctccacggcgcacccttccagtgggccgctatcttccgcaaggaccacctcctcttcgagcccgactcgctcgaccacattggcttctacgactcgcgcgagaagtcgagcgcgcgcaagctgccgtgcaaggtcagctgcaagcagtgccactcaccgctcatggacgagggcaacaacatggtgcgtcctcatacatcgtcttcgaccgatttttcccttcacctgggcgcttccgaagtcgctcttgcgttctactgggacatgcaaatcattgatggcggcgagagcaacgaagctggtccctgcgggcgcagctcgtacgtcgcagccgagcaagggcgagcaacgccagggacggtggcttgactacgcttgcagccctgtatcgaccctgtcgcctgtagttctcgcgcaagcgggcgcgcgtcgaccgcatacgagttgctttgcagcgatgcacgactctgatgcttgcatatttctcgatccaccggccgggcctgcccagagtgtctcgctgacccgccccaactcacgcagtgcctcatcttccctacgcacgtcgacggcatccggaccgacaaggccgttcgggctgacttcactgtcaacacgcacatcttctacgcgagccgggtcgaggacgtccacgacggcatcacgaaatttgccggcatgaacgacgcctcggccgaggtcgacgatgagggtaacgagcgccggtcggagtcggtcgttaagaaggagaaggaggaggccgagaagcgcaagaaggaggaggagggcgccgagaagcgcaagaaggacgccgactcggaaggcgagcaggccgacgccaagaagggcaaggccgacaagtagggccgctcgcgcctgcctcctcatcacgccccgttcgctcttgtcaagacaagtgcactgtagccttagccaacatgcatcaactcgtatacgatcgagccagctggggtgaagatcaggaacaaaggactgggtctgccttctccagtggccgtcagtcgtcacctccgctcccacagactttgagcggtctgattctcgctgacgtcgtggccgacgttcagtccggcgctcgctgttgatgtgcagtcgtgcgccgaattgaaaaacggagggagttgagaatcggagggcggatgcagtctctctttgccggcccatcttgacctcacagctgtcctttcgcgcgcaatggcaggccatcagagcagtcactcttctaactgatccgccactattgtgtcgtcgctcgcgcgtgcgagagtgccgcacaagtggcgcggcgtcgtgcgttatggcgtatagagcggttgttgcagcctctcccatttgcgtactgttagtccaggcagaatcagccctcactgtcgcctcgaccccgtgactctgagcctgcactccttccactacgtcgatgaggccagctgtgagtgcgaaagtgcttacctcagccctgagttttcagggccggctcggagacgacgagtttttgaaactccgctcttgcgcccctcgcagattcgaaccgacttagcgaaacacgagctcgctcctcctgcccttcgaccactcgttaacttcaagtcaaccgatcaaaatggtgcggcatatcgctccgttgcagcagcccgggagcttgcctgctgacactcctttgctcgatgctttcccaggcccgtggacccaagaagcaccgttagtcgacctcctacttgccttgcgtctcgcttgaatagtcggcccggccggcggcttcggtcgtcggtcgcggtttctgtgcctccccattgcctcctccggaggcggcgggtctaacgaggcacccagacatatcaatgacggggccgcattgctgacctcccctagcacacgctgtcggccaactccagtgaagcgcctggcggctccctcgtcgtggctcctcgacaagctgtcgggcacctacgtccgtccctcgcgctcgctccgctcgcctctgcctgcgagctgactttcctactgttccttttttctctaggccccccggccgtcgcccggaccgcacaagctccgcgagtgcctgccgatgtcgatcttcctccgcaaccggctgaagctcgccctcaccggccgtgaggtcaccgctatcgtcaagcagcggctgatccaggtcgacggaaaggtccgcaccgacgacacctacccgcttggcttcatggacgtcgtcacgattgagaagtcgggcgagaacttccgcatcctgtacgacgtcaagggccgcttcacgatccaccggatctcggccgaggaggcctcgtacaagctcctcaaggtcaagaaggtgcagctcggcgccaagggtgtcccctacgtcgtcacccacgacggccggaccatccgcttccccgacccgaagatccgtgtcaacgactcgatcaagttcgactttgcccagaacaagatcaccgagatcctcccctttgaggccggcaacgtcgtcatggtcactggcggccgtaacatgggccgtgccggtgttatcgttcacaaggagcgccacctcggcggcttcgacatcgttcacgtcaaggacgtcctcgagcggacttttgcgacccggctctcgaacgtctttgtcattggcgagggccacaagccttcggtttcgctcccccgtggcggcggtaccaaacttactatcgcagaggagcgcgatgccaagcgcaaggcccaggagtaaatccctgctgtcgctgctgttcgtcgtcgatgaatgcacgccttgtcgtcttgcccttacccttgtcctctgctgcgagccgcgcaacgcctaagggacagttaataccctttttctcttcttttttgagcacttcatctcaacgcttcgtcagtcagcgcaatgagaggccaggttggtgtgttcgcctagggcgagggcgagcgtgaggaggtgccgtgctgctgcgccccgacgactgccaccacctgactcgggccactcaggccgctcaggccgctcaggccactcaggctactcgggtcactcaggctactcgggccaactccccccccccgggtctcgcctgcggtcgtcgctcgaggcaggcatcatccaagggccgtctgcctcgtgctcagtcttcgattgtcttcggtcgcgagctctgacggcgcggcaggtcagcgtctcttctcgccaggctgaccaccactgactgaacacgcgcctcgtccggtctggagggccgtcactggacgcctctcgctccgactgatctctgcaggctcacagtcgcggtcgacggtcgacggttctgaagggcgacagagggcaaagggaggggctggctgctgccgactgcccgcacggccccttgctgtcgccgtcaacccgtccttcgcccgtctcgacccgaccgaccgactcgcccgcgtcgacgggcgcatgctcaggacgagcactgtagcgtggcagactactttggaggagggagacgagagcagactgcaacggagggcgggaccgtgctcgtcggccaaggtgaccgagggctgactgacctcttgctctcttcgcccgctcctgcgtagaccttcgatccggccgacggccagcgtcacgcagtccactaaaggtcctgcctgactgctgccgactcggccttcctgctcttgtggggacgatcaactcgccgttcgctcgggcaaaagaaagcgcacggaccccgaccagagcctgttttcgggcgccagcagcctatcttggtcagcttcccctcattagccctcggtccatgacgcataccggccttcttgaatttcgggccgtcagtacgagcgtcagtgagggtcgctttggtgtggtgttgagacgaagcggccggtgaacggcctcaccatggccgaacgggagggatgccagagcctggtcattgggtccgattcaagcttgccctcctcgagcgaacggatgcttccaaagcgtcgtgggttcgaatcccgctcccttcctaccttttctgcccttcatgcggcgtagcggggcgaatgagagggggttatgcggcgcagggcgagagcggagaaaggggctgcgcggcggtcgaacccccctctcctacaccgcggccgcttctgcgtcctcttttgcaccccactctctctctgctgctgttgataacaccactggtctcgacaggagagtcaccttttgatgcggcaaaggtgatcaggtgaggatgggtggcagccgtgcgcgccgccaaaggctggcttctaaaggagggagaagcaggatgccgggtgctagcagaaaggcggtagatagaccacacggagcgaggtaacaagcgaggccgccgcgagacttactcccagactcgcctttgggcagagtacagcctgggcaccgagagacggcgcgaatggggaagtatgggggaaaagcagcgggctgtatcgccgctccgacgcccgtcgctgggtcggtctctgttcgatgcggtgcagctgacccgagatgcgaaggtcgactctcgccgggaagattcgctagtagtgtcgaggccgagaggcggtgcctgagatggaaccggctgttggggaagacaagacctggtgcgcgcacggcctcaggggcatcggcgttgtcggacccgaccttttgccagcgagtcgggagccgagatcttacgctgttaacggcattcgacggagcgagattgaagatcagtgacgggtgagctcggcgtcggctggtgtcgtcagaggaaaaggaagcaggcgagtatggctgtagacgaacgacggtcgccgacgaaacgctcgcacgactgcacctcaaccctttgcagttctgcgctctgacgtagtcgaccaagaaggcaaacggagattgatgcagatcgtgaagtaggaggccatggagagcagtacagcggggcaaatgcaagggggagcaggccgttgttggttgaacagtaagtgggcagtgggtgagacgggaggcgaggcagtggcgcggccgcatgcagcaagagtttaagcaaagatgatagtgacgaaggagctgtatctaggggttgctgccggtgacggtgtgggtcgacgaggcgttgctgacgctgcgctggcggttgagcgacgagaacggcgccggcagagcgaagccgtggctgggcgaatgcgttgggttctgctggagcgggaacgacggcagggccgaggcgtccgagatggacgaccggcggaatgaggccgaaggcaggccgagactcctaggtgaggcggcgagcggcggcagctgcgtcgaggaggtcgtaaaggacgagggcgacggaagcgagatgcccgtcatcgactgcgaggtcgagtggagcgtctggatcgacggcagccggtggtcgagcggcgagctccgctcgcgcatcggcgacggcaaggtcgaagtgtgggcggtcgagggcgcgccggtcgacgagaaggctgtcggtgagtcgaacgacgagcccgtcgacagtgccggccgagtcggggccgacggcggcgacgaatgaggagtaatatcgatgaagccgcggtcgaggatgacgtcaagatcgaagccccagagctggcccgtctcggtccaccaagcggcgacgttggggtcggccgcgtgccggctgccctgcgccttccactttgaagcgatctgaaagcggccaggaggaacagcggtcagctggcaggctcttcttcgacagcagcgctgggcaaggcagacgcacgtaaagggggaagaaaaggcacggattctgccggcctttctcgccgacagcgttcaggacaaagacgatgttgtcgattgcctgcgactggcgccgagcgaggtactggtcctggacggcgtcgacacctcgcgtcgtccggaccgtctggagctggaaaaacatggcgacctcagccgccgtatggaggacggcaaaggcatggcccgagtcgccacccgggccagtcgtctcctcggcgagggcgccatcgccgaccggccggtggtggatccggtcgacggccgccttaaggttggtctcgttgaactggaggccggccggcagcgtctgggcccacgtcttgaggctcgtctcgtggtcgaccggtccactgagccggggcgaacgcgagacggttgtgccggagaccgagctcatgatgtcgcggaagatgcgctggacacgggcgagctgcaaaggagaggtcgacagtcagtcagcggcaataggcggcaattaaagacggaaggcaacgcacatggccgagctccgagatgagcatcttggacggaccggcctccgggtgagtcaggccgtcggaccgaagaccctcaccacaggcgcccatctcgaagcggtcatccgagatcggcagcgcgagccggcagtcctgcgcgctgaagcccttgggcccgcggacagagagcgagcgacctgactgggcctcaagcgaggccgcgaggacgtatgtcgtccagaacagccgcgagcggagctcacgcgcggtcgaggctgcccggctcggtccaaagtcggtcggcggcggcggagggttgtcctgctgcgtcaggcgggtgacgaacggcacgagaacatctgaataagagtacgagatgcaagtcagcgactggcacataggcaagatgggaaaacgaccggacgaaccgaggtactgaagcgtccgggtcccgcgccggaggagcgactcgtagacggtcaggaggacgagggcctgagcgcgctcgacctcctcctctgggtcgacgacgtcgccgccatggagagtctgctcgacccactcgggccgctcgacaacgttccggacctgactcgcaaagacctcgcctcggagtcggcgctcgggcgagagctcgacgagcgacgggtgcgacgagaagcgggccgaccaggcatagatggcgttcaggaggagaggcgacgtccgatcctcgtacagggctgaaaagaaggtcggcttgtggaagatggacgacaggggctcggcaaagtgctcaaaaaagctggggacagaggaagttggtgtcagcctctcggcctcaactttaaacgggcagaggcatgacagacgacttgacgagcgaccgcttcagcagcggatcaacacgcggcccgctctgcgactcaaaccgggccttcgtctcgacaaaactcgaccgccgctcgacctgagcccggacggccggaggcgtttggctgccctcccacagcggcgagggctggcccgatggcgagcgcgagctgctcgacgaggcaccccggctggaggacgaagatgcagcagcagtggaggccggagcggcgaggctggccgtccgggcggcaaaaaagccctcggagagggtcgactggcccatcgacaaggggctcggcttgaagatctggtcgacgagcgtctttgtccgcttcttggcttcgctcgacgccgatgagagcttgcccgaggcgctggatgatgatgatgcggcagcagcggcgacgatgacggccgcggcggctacgagggcggggctcgccgctgaggacgaggcttccgaggcgttaacggcttcggtcgaggacggccgggtcgaacgaggagcggacacgcgctggccgctggaggagacgtagatgcactcgcgctggaaagaggcaggggagggcgaagtcaggaaacaagtggcgatgccgaaagggccgattggagaagccacttacgccggagaattcactatagggaaaggagaaaggagacagctcaagtcagtcttcgctcgcaggcaagtcgtcgaacgggaagcaggcgcgcgaaccagttggcacagggtgcgtctcctggagatgcacgagggggtgaaggtcaggagccggatccggaaaagggacaacggtcgttgagggagaagcgaacggaccagagcaacggcgcttgttcttgtggcaggcagctgttggaagaggcagacaggtcggtcagtcgggccggacgagttgacggcgcggccgatgagccgggtcggtcctttcgaaacgcggggaaggaggcaggcccatgaaactcactgccgccgggggcgtaaaaaaaggaccggtgacgagagtcagttcaaggacatcggcttggattgagggagcaaagcaggccgacaaacctgcaagcctttgcgagacgctgtcgacgaggagagaagaaagaaggcggtcagtttgagcggccgagactcgcccggggtggccttgaacggactttgcgtttcttgcccttgctcgtcaggtcctcgggccggaccggcacgccggcctcttcggctcccgagctgttttcgcgaacgagcgagacgcggtcgatggccatcttgacatcgccggtcgaggacgacgacgacgaggccgacgaagcgaccgacgatggtgcgggagggaaggccttggtcggtcgttgagccgacgggccgcgagccgatgagccggcggcggctgaggcggcgagcgcagcgccttgggcggcaacagcggcagcagcggccggcgggtcgatgcgcgcggcggcgctcgccggaggggatggtgtcctggcgagggcgtggtacgaggccttctggtcgtccatggtcgaggcggccgagaggaggaggtcgaaagcggacagcacgggcggcgggtaggggccggcagcggcggcggcggcggcgggtggtgagcggcggagacgcttcttgtccggctcggcaaggaaggcgggcggcgggcagcgggcaaagggtgcagagggcgtggcgaggccagagctggtcgaagagcacgtcgaggacgggctgctggagcgagctgcagacatcgagggctggtcagaggtgggcgtcggggcgtcggggcaagagcctcaaggaccaagaggcggcaggggacagcgacgacccgcgacaagccgtcggcccggaggatcccgccctgcagcagcagcgagctgctgccccttttcgtctccctcgtgatcatcacggtcggacaggccagcctacgttgaggctcttcatatctgccccattttctctgcttcccctcgtccatctactgctcgcaactttgcgcaggaaagatgggttcagggaatgagccgcagagggaaagtcacgagccggcggctgccgccttcggacttaatcgatccaatgccccgcatcgccttcggggcctccctcgcctgcgcctgggtcggcaacggtttgctgtgcggctctgctgcagcctcaccagcaggaggagctgccgcctgtaaagggaggaggagctctcaaaaaaaaaaccgtccgacctggcgagatcttcccctgctgccgcctcttttgctcgttgatgccgcgcccctcatggcagcagccgcgagctgctcatcctcgcagagccgccgcctcgcccgtcaatctttagctcgcccgccctcaccctcgcctcgtcatggccagccggccgtgcgggacctcccggagtctactttacgcacgcagagaagggaccgagctcgcccgccttcaaccccacacacgcacgcgcgtgccccctcagcccgccgggccggccagttcgagagaaagtgacgatgcgatagggcagggtctatgtaaacaacgttccgttcctttggagaccggcgacttggaggctacccggccggccggccggctgatgatggcgacgcggtgtcgcggctggcgtcgtcggcaagggcttgttcgcgcccgagccgacatcaagagaggtgcggctactgacggccaccgccgtggtcaagctcgacagtagccggccgtccagcggcagccggcggcggcctgtctccaccggccaagggtgtttaaagagtcgacgacggcaatacggacggcgcattgcgcgcccctctctcagaaagacgctgaccaaggcgacggccattcgtgagctcagcccctcagcgcgcaccgcggcccgtcgacagccggccaaagccctccatcagcctcgagatacgactgtctgcgcccggaccggcgacagggtcggagccggcagcagcagcctgtggagggccggatgcattggaaggatgaagttggggcgagaatgacggtcctccggcgggaggcggtggtggtggccggggaggctggcgctgcggtcgggtctgctgcgacgacgacaatggaggccgaccgactgctgtcgtcgtcgtcgaaggtcgtgcaccgttccttgcaggcagcggcgaagtatgcgccgagcctgaagccgatggcccagccttcggctgcagatccggcaggacaatctttgagaggtagatcgacatggcctgcggcggcgccttgtcccatggctgggagacgctcggcgtccgctttggcccggcgttggcagacgaggacggtgggccaggagggaggggcgagggttgcggagagaggtcgttgaggttgatcgttcggggcggctgcttggctgctgggggcggggcagggcgaggtgtcggcggaggcgtcaccttttcctcgacgaggtacctggtcgtgcagagagctttggtgagcgacatcctttgaacgcaaacccgtctctgaaggacgcactggtgcatctcgctccccgcctcgagctcctcccaccggcggagcctcagccggccgacctcctcgacgacccggacgcccttgacgatctcgtccggcgttcgcgccttgaggacaacaaagagcatgctcgaatccttgagaaggtcaaaggcgcggttcgcgagcgtcgcgacggagtggtgggcgaggaggacctcgttcgggttgggctgcgcgcagtagcaaggggaggtgtcaggcgctgtacggcccgtagaggtagtggggagactgaccggctcctcgaagtcttgccagccctcgagcccgtcatcctgcttcggcggctttggcgcgggcggcggtggtggtggtgctgccgcgggctgctgcggaggccctgtccccgtcgtcgacgcccgctgcgacgcgccgccaacgacccgctggccgtccggcctcggcccgcccgcccgctcctcgtaagcgtcccagaagccgacgaaagcaaggacgagcaggacctcgagcccctttggatccttgatgtctgcaaaacgctcaatgttgtactgctggagcgagagctcggccccgccgcgccagggcgagccgccgggagtgatctggaagcgggcgaggtcgacggccggatccggcgcgcgcaggaggtagagcgtaaactccttggaggacgtcagctttggctggcgaaactcgtacgtctcgccgaggtaggtgaagcgccaggtgaagccgagccggccggcctgctggaggccgccggcgacgaccgtgtcgggctggaagagctcgagctgcttctccttcgattgcgccgagggcgatgtacatcttgcgagcgggctctcaaacagggcgtctgagagcggagaaggagggaagaggggaggtcaatcgctcggcaggggctcggaaggggggcgagcgcaggcatgcgcgcgggagatggccaagctggccgccgcgccgacgcaccctcaagcacgcagtcgtaggccggcccaggcccatagacggcgcggtagacaaccttgcgcgtgtgcttgttcatcaggtcgacggtcccggcctcgcgccggtggaggaggtagcccgggagcgagctgggcgggagacgggctggtcagtctcagccccctcgggcgaccacggccaagcaagcgagagccgggcgcgatgcgagaggaacgcacccatcgagcgacatggcccggatgtgagagagcctctagagtctaagggtcccggaccgagggcgagggcttgatgagagagttggaggtcggccggctgcggtctaggcgagggtgactgtcaagcggtcggaggcagggctcaaccacgctttggaaaggggttcgagcctttttttgtttttcaatcgagccagcagcagcagcagcagcaaggacgcgacgagccagacgagctagcttgcctcgcctctctatcgcaagcgggtcgcaggcacgacttgcaagcacccttctctgctccgtgtctctcgctccctcggtcgctgctcgtccgttgctcgtcgctcgccgcccgaccgccgctggcctcttccaggtgctgccgctagcctccgccgctcgcctccgccggctcatccagctctcgcccgacctcatctgcggccctctctcctcccatcatggccgaggccgacgaatcgatggaccccatcgacgtcctgtccgacgacgagcgccgtccggccgctccgaatttgacgggcggcttctttgacgatgacagcgacctgagcgacgttggccaggacggccacgacgacgaccgccccgacgtgcggcgcgtgtcggcgccgacgacggcgggcagtgacaagccgtacaagacgtcggccgacgtcgtacgcgagcggcagcaggccggccaagcgtccggtcccgatccgagcgtgcgcccccctgcccttcttcctgccgacctgccgagcgggggacgcgttcagggcgcgagagctcctgctggatgaccgaccggctcgctgaacctcgcatacacccctcccccgctcttgcttcccagatgccgggctacgccgaaatgcgccgcaacggccacctccccgactggaagctcagcaaggcgacgtcctcgaatgcgagtccgagctcgaccggtcgagcgccctcgcggccgaaagggactggcgtcaacctctctgcgccgacggctttactctcacgcaagctgagcaacggccagacgccgtcgtcgagcctcatcgtcgttgacgccccaccgccgtcgccgtcgcctgctccgctccctcggatcgagcgcaagtcaacgcgatcgatggacaagaaggctgcgccgccatcgtcgccggtcgacgtcgtcgagatcaagtcgtcgccgccggagaaggcgcggaagaaggtcgcgccggggaagtcgaggaccaagagcaagcagaagacgacgcggatgctatcgtccggggacgaggacgagcggccgccggtcaaatgcaaaaaccagccggcggcctcgtcgtcgttgtccaagcctcctcgcccgaaccggccggttccatcgactgcccagctgaccactcggcgcgtgcccggcggcggccttcgacccatcggggacgaatgggacagcacgctcgccctgtcaaagaaggctcgcgacggtcaaatcctcgagcagacgctcaaggacgtgaaggcgagcaagatggccaccgagaagcgtgtcaagggcaaaggcaaaggcaagcacgtgttgatccccatctcggccgacgaggacgccagcgactcctcacctatccagtcggccgacgaggagaagcccaaggctccgcgcccgaagcccagggcccggctcgaggcgaaggagcaattgccgtcaccgccgggagacaaagataagacggcgatggctgcgctcctcaacaactcgaggcagcggcaacagaccgtggtggacaagcagcggcttgaggacgagaaggagcgcgagcgctttctgcgggagggagcggcagtcctcgccgacggcccgatggcccagattcgggcggccggaggtcgcggcgcgctgcgaccgctcggttcgaccgcgagcttcggcaacgccgtcgccggcccgtcgtcgcaaacgaggagccggacggggtcgaacgcaagctcgagctcggccctcacgtcgcttgactctctgtcgtctgacgacgagctccagctcggcgcggcgccgtccaagatcaagctctgcccctactgctcggagccgctgccggcccggcagaccaagaagctcaagaagctcctccagcggctcgagaaaaagtcggtcgcaatgccgacgtcggccaacccggacgcacgctcgctcgccatctcaaagtcgtcggtcgtctgcgcgctccaccggagcgagagcattctgatcccagagggcgtccgcaaaggctacccgctccggattgactggcggctgacgatcggtcgcgtgcgcgagcatgaggctgccatgctcgaggtcatccgccggaaggacagcgtcttttgggagtttgctaaggagcggacgggcgaggtcggcaagggcgtcagccggagtgcgcgcggccagtttgacgtctttgagaagtgccagcctggctagtacgtcgtgcctctctttccctagcccctcgactgtccgcgctgacaccgtccgctctgcagcttcggtgagatcggccagatcctcttccatcagacgctcgtcgacatgtttgctcggccgccggcgccggtcctgacgtcggccaactgcgagccactcaccgcgtccgacttcatctactgggtccttatcccggagcttgcgatccttctcatccaggaagacctcgacgtctcgtaccgcgaggcatttgaggcgatgaaaaactcgcgcgagtttggcctgagcgtgtttggcgtcgaagagggcgagcagacgggcggcgctctgatggaaggctgggacgctgacgctgaggaggtggcgagcggcgacgagcgcggcatcaccgtcctccggcgcaagctcaacaagtcggtccagcaccggaagacaaagacgtcgcagcgcgcggccgaggggttcccggcttacgaccccaaggcattcgaccggccagatgggtcgagtagcggtctcgcgagttcgcagacggcacgcgccggggcgctccgttctcgctcgccgccgcttgcgttcggcagctcgcggctttcgtcctcatcgtcacgagccaagcgcaaagaggtcgacgtcgatccagagcccgaaccggtcaagaagaaggtgggcctactctagctccccgtctctgcgagagtgcttatgcggatgctcgcgcaccttcctcagcctaagccaaagccgcgactcgcgccgtcaggctcgatgccggacatgctcagcagtggcagcagcgcgccctttggactcctcagtcaggacgccgtgcggcacgacgtcgccagtctgacgctcgacagctcgccggccgaggtacccgagatcgttatggccaggccaaccccacctccgtcgtgcctccgcttgaagccagctgttcacgttcgaaagcctgactgacgcggccatcctttcctttccagaccggtccctaccctcgaagctgacgacccgtacgacgatctccacgacttcgacttgggagattgaagcgctggcggtcggcagctctgggtgccataattgcccgccgtcccctccgctctgcgcctcgcctttagacagcccgccaagttgcggctcgccctcccgcggtgcacgccatgccgcacctgtcagaccagcgggtgcgatcgcgaggacgaacgctccacgtcgaccgctgccagcaaacggagacgctctagcttctttcactcctcacgagagagagaggatacatgattcgatgtatgccagctactgcaaacgacccgctcagatgtcaccaaagcggtcgggtagcaggacgggcgcgaatctagggcggatggagagatgttggtcagcctgtcgaactacacattgtgaggcagagcgcggcagagacgaacaggctccagagatagagagcgatgcagccccacgagctgacaacacgcatccacattgcgccctgcgagcggccaatgtagacgtcctcggagtctccggggtcggacgcccgcaggacgcgcctgtcatggcagggatgagagtcgtcagggtccgagctcccacgagtggccggcaggagaggtagagagagaggacacaccagtcagtcagcaggccagcaacgtacatgctcgccatgatgaagatgacgtggaaccaggtgtactggaggacgcggatcagtatcagcgctagcaaaagggcgggagagagaaaaggccgctcaccgagtacttggtctgcgtccgctcgtcgtcgcgctcctcgccgacagcatcgtcaccctcgccgtcgtcagaggcctgctcgtcggtctcgtcgagcgccgagcgaggcaaagccccctcctcaacggcggccaggatcgcctggtagcgcatctcgttccggcgcggcttcggctgctgactaacgagcccgtggccgtcctcctcggtctcgtcctccggcagacggacagcgcccttgcgcttgcctctcccagaagcaccaagcgccttagtctgcgtcgccgcccgtgtcgtcgagtaggcgacggcaaggaaggtgaagatggcgccgaggatgacggtcgtcgtccgagcgccggacgagccattggtgagcgggttgcagacgcctccggggtcattgtggttggcaacggccgaagcgacgaggtaggtcgagtagagcgagacgatcgacgcttgagcaaggcccgacttggggtttgcctcctggacggcaggcgcaaccgacgagaccgtgaggacgattgtcaggatcaggttggccgtgatcaggaacgtgttggtctggcaatcgctgccgccgaaaaagatgtagaggacgacggtgagggtgagcgagatgatgaaggcgccaaacgtggtgccgacgaggataaactgccagacgggcgagttggtgtcctcccagcgcgtcagaagcgactcggagaacgagtgggcaaagtcgatgaggagcaggaggccgagcaggatgaagagcgagctgccgatcggggctgcaaaagggaggattgagcagggaatcagcgtggtggggggcgtgtgtgacggacgacgcgctagacagaccaatgtaagatccataaaacatgaagaagccgttcgggatgaggaacgagaggaagacaaaaatcatccacagcaggaccttgggtccccaccatctgaggaaatgggcaggccgtgggtcagcctcctccctaggcagactgcggagagggaacgcacccgttctggagcgaggcccgcttgttgcgcgtgttgtgtacgccgatgaggagaagcgcgagtacgagatgcagcagaccaagcgcaaagcaaaagcggtggacctgagcgaaggcgtgcagaggctgatcagcagtgatgcgagctggcgacgacgagccgtgacggggacgcaccgcgagcaagccgtagcactttccgccgtcgcagtcgagctttatccagtcccaggcgagcttctcaatctgcttgatggcgatatcggtgcgcatgagccaggccagcatcgagttaatgcagaacaggatctgtgaagggagggtaggatcgtcgtcagtcgagctgggtcggccgggcgaagccatcgggctgagccgccggacgcacagcgaagccgactcgggtggcgatagagcctgacgagatacagacaggacacgaatcagcttagcagatccgcagagcgtcaaattgcaagccggcacgcactgttgcagttgcagctcttgaagagggcgctggcggccgtcccgctcatgaagaacagcacgccgccaagggcagacgaggcgagcgagccgaggccgccgaggatcgggattgaaagcagggcgcccatggcggcagactgcaggggctctgaggccttgtctgtagtgtgagatgaggtgtaaggagcagagacaaccggatgggtaccggtggttgaggtgagggtcgggatgcaagggcaagaggcgatgcggcggccgccgcctttctgctgcggagggcagcgtcgtcgccctgcacgaacgatcccctcctgctagagctgatgtcaaaggatgttcattcagatcgaggaccagcgtaggtcggaagagaggcactatggaggagaggggaattgctggagcttgcggcgaagggtagatgcacagcgctcggcaaaggaagagagccgagcaacaaaagcgagagcaggacacagaaagccgcctcggtggggcgggaatcaaaacgggagagatgaggtacaggtgggcgagagaaggggggaaggcgagagagccattactgtgcggcggtcaggagtcccttgaacggcaggtagcggccgccgacgcgcttgacgtcgccgacgagcgacggcaggtgcgtgatggcgaagaagatggcgaagcagatgaggaccggcagccagaagaaccagagcctgcacgggacggaagataagggtaaggcgtcagcagcgaagagacgggtggcaggcatcgcatggcaaggacgcacatcttgtcgtacttgccgcccttggcgctcttgcgggccgagtggtggccatagcgagcaatctcgcgctcagtcagccgcctggcctgagcggccgtcgccgccgcccagctcggagacttctcctttgtctgcggtacgacttgcatcgtcgtcgtcgtctcggccgtcgccagcggctgcttatcgtcctggctgacggcgagcggcgggatctggtactttgaccggccggtcatcgaaatggccgcgctctcgtacgtcgactggatccgctggagcgtcgtcttctctgaagggggcgccggtgcggggtcaagggcagcaatgttgccactgcccgaggcagtgttggcggccgacgacgtcgggacgttggttgcaaaggagccctggccgaggatccggagcgcaacgttcttggcgtcctcgatccggccagtcatcttgagaccaacgacctgcagcgcgagctcgaggctgaggtgagaatgcgtggggtcagcaactaggtgagcggggccaaggttcaagtaggagcggacgcacagggctcggtcggacgcgtccttgtaggtgaagagctggccgccggcgcccgaagcaccctcgatcgaccgaccctccatgcggaggatgaccgggaccgagccggcgacgacgcccggcgggacggtgcagacgatcgtcccgtcgttccaacacgacgtcatcgacgcccggttctcgccaaagaaggcgaccatgccctggagaaagttgacgccgagcagcgtgatctcgatcccgccggcgagcggaccctcggccgggatgagccgcgaaatggatggccgagggagcggaggcggcgccggcggggtcggcaccacatacgagtgctgagggtacgagatctggatgttgttcgggttgttgagcgccgacggatagatcgagggccaatgcgagtgcgggccagacatcggggccagcccggtaccgccgagaagcgagtccgagtcagatgacgtgccggacgaagccgacgtctcgcgcctggacgaggtcgagcccgaagctggaggtgagaaggccgagccggtggcgcacgacgagccaccctcatagtcgacgagcgagtcgaacgacatggcctcaacgtcgccgtcattgtcggccgtgctcaccgtgtcgaacgtcatgtctgcatcggagccagtccgaacaaatgtcggccgatagaacgagccgcccgagcgatggtaagcgtcgctcgtgtcgcacccgtcactgcctgcgaggccgagcgtcggcgaccgcgtcttttggagcgagtcgtgcggcctggcctccatcgagaagagcatgtcgtcgatagagccaagctcgatccgcatctcgcccgagttcgggtcgcataacagcgcattgtcgcccgtcgtcagaccggccaggccaatcgccgaggccgaaggtggcgagtcagccgagaaggtcggcagtcgagatccggcacgccggtcgagcccgccgtcgagcgtaaagtcaaacgagccgtcgtcggcgtcctccatctgagggagagccgtcgacatgccaaacgtcggaaagtgcggcgtgccgaggacagacgaggcgcccgagagcgacgagcccgctggcgacgagcgacggtcgtacggcgttgaggccgacgcgttcgccgtccgctgcttgcggttctggtgatggcgagttgcgtcggacgaggtcgatgacgacgacgagtcctcgttcggcgaaagcgagttgctctcgccgttgctgcgagcggccgctcgcttggtcccgcgcgggagcggcaggatcgctggcagaggcgtgctgaccgctgttgccagcgcagacgacgtgaccgagttcagggccgcaaacgagggcgagacggtgccattcgtgtgcgtccgggacgtcggcgccgtcgaggccgccgtcgaggcggcataggcgctcgcggccgaagacaagggcgcggtcgagccgcggtacttggcggctccgttggcggcgatcgaatggccgttgcccgatgacgacgaccgcgaagacgtcgaggccggggcagaggccgttgcctggccggcgcccttcttggctccgctgccgagcgacgagggcgggttcgacggcatgatgagcaccttaggcccgctgccgctcgtgctgccggcacgggatccggctggcgagcccgaaatgtgctgcggcgccggaaggccgacggcggcggcggcagcagcggcagctttggctgcagcctcggtcgacttctcggacgacttgtggtcatcggtgatcatgagcggcggcgtcaggccggttgagacggcaacgccggcgctgttccgcagcgtgaacttgaggctgcagaggtgggggtaagcaaaggaattgtcagccaccgagagcgagaaacggccgggacaagaaggcttgaaagtaagggacagacatgaagccgagtttctccttgtgatgccggcagtagcaggtgacacgcgctggcagctggacctcgcccttgttgagcgtgaggagggccgcacaattgaagaggacaatcttgtgccgctcgtcgacgtgaggagtggtcgtcccgggcgtcacagatccggccttgacgctcgactcgccgctaccctcgccgacggctgggctcgcagtgtcggccgcacccctcccacggctcgacggctcgtcgaggtccgaatcggagagcgtcggcttgacacgcgctgcgagcttgcgctggctccgcttgacctctcgcgtccggcaagaggcgcaggcgaagacgggccggccgagcgtccccgtcggcgagttctcgggcacgccctcggtcgcacagaagacttcagtctcgagccagaggatcgactcggccggtgggttgacggcaggctcggcaagtgactgcttgcgcgacttgcgcttcgtcgccgtccccttctggagacggacgtgtgagtagcgctcgaggccgagcgctgacgaggctccgtccggcggcgcgagcgcgagcgtgagcttgacctgcgtctcgacccgcgacttggccccggtcagagggatgccctggatgctgagtgagaccggcgttgacgatgagtagcccggactggccgacatgccgagcggtggggcggagacggtcgaagccatcaacggcgagcgacgaagcgaggcccaggaccgggtcaaacaggagcaggcaggcaagcggctaggtttgaatgctagatgtcgagcgcgtgctgagcggtcgtccgctggttcgactggaggtggtcgctggcgggtggatggcgattagagttgaagctgaaggcggcgcaagggaggttgcagggcgaaggaggagtgtatgacaagagggagagagggagcgtgcggttgggcggttcgctggcgtgggtatgcatcgagccaggtcggttgcatcgccgcgggctccgtcctcgcagagtctcacttggctcatgctgcacagagaaagtgccatgcgaagaagatatgcaagtgcttggggtgcaaggagagattgcgatgctaaagagctgcaaacgaagtacggtctaggtgagtctaaagtaaagctttgccgggcgagaaggctgtacaggggagggtagggcagggacccctcttgggcgaagctcgcgcgccctccacgcgccgagctccccggcctcgcagctcgcacggctgaccacgcctctcgtccatggcgctcttctctcctctataggagcagcagatggcgcagcagatcctgacgcagttccaggagaacccagacgcctggcagcgggtgccggcgatccttcagcaggcggcgaacgcgcagacaaaagtgaggacccccggcctctcctctgtcctcctcgccgagcacactctgacctccatcctcgcactcccttctcacttctcagtacatcggtctgcagatcctcgagaagctcatcacgacacgatggaaggcgcttccggcagaccagcgcggaggtccgtcgcccgtcctccgaccgcctgggccgaggcgaccgcaacgagctgccgcgctgacctcttgctccttcttcttatccctcgccaggcattcgcaactttatcgtcggcgtcgtcgtcgagatctcgtcggacgagacggcactgcgaaggcaaaagatgtacatcaacaagctgaacatcacgctcgtccaggtgcgtcgccggccggcgccgtgctctgcagccctccgcggaacctacctcctgacgctttcgacccacctgcagatcctcaagcaggattggccgacaaactggcctcagttcattccggaggtgcgttggaccccagctcgtgcctttcgcagtcggctgacgctgttgtccggccctgccagattgtcgcgtcgtcaaagacgtcgctgccgctgtgcgagaacaacatggtcatcctcaagctgctatccgaggaaatctttgactactcggccgagcagatgacgcaggccaagacgcgggcgctcaaagatcagatgtgcggcgagtttggcgagatctttgagctctgctccgaggtcctcggcaaggcccagaagccgagtctgatcaaggcgacgctcgagacgctcctccgcttcctcaactggatcccgctcggctacatcttcgagaccaacatcatcgacaacctcgtcacccgcgtgcgtcctggcattgcgcgcaagcatggtgagcgccgttcggctgacgccctcccttgcactcccctcagttcctcgaggttcccgatttccgcaacgtcacgctcaagtgcctgtccgagattggcggcctccaagtcgtgcccgagtacaatgcgaaattcgtcgttctcttccagatggtcatgacgtcggtcaacaagatgatcccgccgtcgacgagtgcgttcccctcggccctgatctatctccgtcgtacgaggttgacttcctttccttttttcgcagacatcgccggcgcattcaacgaatcgtccgacgctgaccaggagctcatcaataatctcgccctcttcctcaccaactttttgcgcgagcacctcaagctcgtcgagaacgagcagaacaaggagctcctgctcaacgcccacctctaccttgtcaagatctcgcaggtcgaagagcgcgaggtcttcaagatctgcctcgagtactgggccaagctcgtcagcgagctctacgaggagatccagtcggtacgtcgcctgtgcccccgcgagttctgttcaggcggtcactgacgccctttctctgccgcctactcgcaggcgcccgtgccagagatccacccgctgctgagtctcaacctctctggcggcatgggcggcgctggcttcccctccggccagccgctccggaagaacatctacgccgaggtcctgtcgaacctgcggctcgtcatgatcgagcgcatggtcaagccagaggaggtcctcgtcgtcgagaatgacgagggcgaggtggtccgtgagtttatgaaggagtcggacacgatcgtcctttacaagagcatgcgcgaggtcctcgtctacctgacgcacctcgacgtcctcgacactgagaacatcatgacggaaaagctctcgaagcaggtgcgtctgattggctccgaccggatgcgttgagtggtccccaaatgccaacccgcgtctgctgctctccgtgactagatcgacggcagcgagtggtcgtgggcgaacctcaacacgctctgctgggcgatcggctcgatctcgggcgcgatgaacgaggaggccgagaagcgctttcttgtccaggtcatcaaggacctgctcggcctcgtcgaggtcaagcgaggcaaggacaacaaggctgtcgtcgcgtccgacatcatgtacattgtcggccagtacccgcgcttcctcaaggcccattggaagtttctcaagacggtcgtcaacaagctgttcgagtttatgcacgagagtcacgagggtcggtccgcctgcgctttgcacgacagaccccgtttcgccgcccgagagctgacccatcttctttcgcctcgcgcaaccaggcgtccaggacatggcgtgcgacaccttcatcaaaattgctcagaagtgccggcggcatttcgtcgcccagcagtcgggcgagcaagagccgttcatcgacgagattctgcgcacgctccaccgcatcacgctcgatcttcagccgcagcaggtgcacacgttctacgaggccgttggctacatgattgccgcgcagccgaataagccgacgcaggagcggctcatcgccaagctgatggagatgcccaacaacgcctgggactcgctcatggcccaggcggcgagcaacattgacgtcctcagcaacgccgacaacgtcaagatcatgtcgaacgtcctcaagacaaacgtctcggcctgcggctcgatcggcacctttttcgcgccccagctcggccgcatctggagcgacatgctcggcctctacaaggccgtcagcggcatcatcagccagacggtcgccgagcagggcctaattgcgaccaagacgcccaaggtccgcggcctccggacgatcaaaaaggagatcctcaagctcgtcgagacctacatcaagaaggcagaggacctcgagcaggtcaacagcaacctgattccgtccctgctcgacgccgtccttggcgactacaaccagaatgtcccgaccgcgcgcgatgccgaggtcctcaacgtcatgacgacgatcgtcagccggctcggcgtacgtcccttgctcgtgctgccttgctgctgctccttgcctaaaaggctgacccatctccttttgccaccctgcgctgcagccgctgctgtcggaccaggtgccggccatcctcgacgcgacgttcgagtgcacgctcagcatgatcaaccaggattttgccgagttcccggagcaccggctcggctttttcaagttcctccgggccgtcgaccagtactgctttggacgtgtgtcgcgctctcggtctcgcccgcggctgcagccagactgactcgtcctgcccctgctcctcacacagctctcgccgcgctgccgccgccgacgttcaagctaatcgtcgacagcgccatctgggctatcaagcacagcatgcgcgacattgcggacatcggcctcaactttacgcttgagatgatcgacaacttctccaagacggaggagcccggcgtcgccgacggcttcttccaagcctttaccgtccggctcgtgaccgacatcctctcggtcctcgtcgacccggaccacaaatcgggcttcaagacgcaatcggtaatcctccagcggctcattcacttttcgatgaacggcctcgtcaagcttcccatctatgacccggcagcggtcccgacgcctggcatctcaaatgcagagtttctccgcgactacatcaacaacctcatgcagacggccttcccgcacctccaggcggcccagatccggcagagcgtcgagcttatgtttgtcgcccacgaggacccccagaagttcaagctcgcgctccgcgacttcctcagtacgtgtcgggctgcggattcatgtcgtgctcattgccctccgacgactgacgctcttttcacccctctcctgcagtcacgatgaaggagttctctggcgacgaggctgagacgttttttgtcgacaaggaggccgagaaggcggagcagcaagccaaggacctcgaaacggcgatgcgcgtgccgggcatgctcaagccgagtcagatagacgaggaggagctgtagcctgctcgtcctcgccgctggctgctctcgtcaccctctccctccctacatgtgcttcgcccctctcctgtgtctccttaatccgcgtctctcacacccacctcgacctgcttctctcctgcccgctgcatctttcgctccgctgtaccccgcccgaccttcttcacgcatgccccctccccttccttcctctgcgcattttcctccttttcaccctcatctggataacgatgctccattcgcacgtcctcgctgtttgcgatcagctcgcgcatcccagaaagcgcacaggaggaggaggagcaggttcaccggccggtcgtctcggcgtcggtgtcggcgatcgccgccggccgccttcagctgctgctcggccctcctcctccttctcctgatcaccatcgcctctcttatcctgtcttgtccagcatgtcatgtgcgcggcagtctgctcgtcccaatatcgtgagcaagcgctgaccctgcccaccaacggctcatccacggggtccccttgcccgctcgcagcctccatcacactcaacgatggcacgtcgatgccggtcctcgcctttggcaccgggacggccttgtacggcaagtcagccgaggagcaggtctttcaggccctcgaagttagttgcgcccgcggttcggcttaatcggatggcagcatgccgtctggctgatcggaggaacctctgcacgcccccgccgccctacaggccggcttcatccatctggactgtgctgcgatgtacggcaacgaggagagcgtcggcaaaggcctccgccgctacctcgagctgagcggcaagcgccgcagcgatatcttcatcacaagcaaggccggcggcgacgacgtgcgcaaatcgcttcaggagagcctcgagaagcttggtctcgactacgtcgacctctacctcagccattcgcccctccttacgccggctcggacccagtggccggtgatggaggcccttagaaaggagggattcgcccgcagcgtcggcgtctcgaaccaccgcatctctgacctcgagatcatcgaggaggtcgggtcgatcccgccctcggtcaaccaggtgcgcacccgtcaaatgacccgtcgttggccgcacacggcgctccgactgactggtcgtgctggacttgctcacagattgagatccacccgtacgtgatggaccgggtcgagcccctgctggccaagatggcaaagaccgacatcaagcctgcagcctacggcccgctctcgagcgtctttcggttcccgggcgggcccgtcgacgagttggtcgcaaaggctgccgcccgactgcacgtcagcgagaacaacgtccttctccgctggacgctccagcggggtggcggcgaggtcgtcacgacgtcgtccaaggtcgagcgcctgaaggaggcactcgagatcggcagctttgagctgacggccgaggaggtacgcccgtcgggtctgcgctgcctttgtcgatagtctgctgatgtacgccctcctgcgcccgaaaggtcgacgaaatcgacgctgcaggcaggacaaagcaccagcgcgttttcatgaagcacatggacgacgacgcctgaggagcagcagcgccctggtcgggggcgagcccatctatcaagtcctgtcgtgtcctttgacgatctggctttcatccggcgtacgggatgctgtcggcagaggagagggcggagcacgtcagcttcgctcatcggcagagatcggatcagagcgaggcagacgcacccgttcgtgtagagctgagcaaaagagggaggtggtgggcagtcgttgtcagtcatgggcagcgtagcaaacaagcttcaagagggcgccggggaccgacctggaacgagtcgtataggttgctccgcttgttctcgtgagcgtccttgatgatcgaaatcatgaactcggccgccttgcgttccgtcagctgcggctggaagcgctgccgcaggcggtcgatcgtgccctcgcccttgaacgagggcagcgccgtctcgagcatgagccggaccgtgtcgacgagctgggccatgtggggccggatggcaaggaacgccttgacggtgagctcctggaacatccggtagccctgcgactcgcggccgcccatcaggacgaccatctcgtggttgagcttgaacgagttcggctcgaatttgacgccctgaggagcagtgaaggcgaaggtcagctgccgctgagatggactcgcagagacgggccgcgacgtactccaggcccgatgtcaaagaggaagccaaagtcgatgtggacaatgtggccatcgccgtcaatcataatgttgccattatgccggtccttgatctggagaatgtagcacgcgacagagtaggccgccattgactggataaaggccatgcgcgcctgctggaacggaaccgtgtcgacgccgccgtacttgtcgacaaagaagctgagcaggtcgttgaccttggccctgcccatctcgtcgcgcgaggtcgcgttcggcacgacgtcgatgacaccgcactgcaaagaaagggcagcagaggcggtcgtcggtcagcttctgggcgcctagccggccgcgaaacgcagcacgcactccaggggcggtcgccgtcacgcggtaaggaaagaggtagagcgtgaggccgatgtcggtgtagatgttcttgaacatggcgatgatctggagggcgaggacgtcttgccggcaatcgtcgccgaccttgaagatggcagcctgccagacctcgtagtgcgatttgctctgcgcgcgcttctcgggatcgtcaatcaccgtatcctcggcagccggcgcgagctcgacgcgctccttgcggaccttgaaggtcgccatgaagggcgccttagaagggtcggatagagcaaaagtcagcgtcaacaggagcaaaacatcgagaagagccggctgaccttggcgtggctctgaagaggccggcccgacttcttgtcaatgtcgacgacgacgccgtccgggtttgacggcaggtagacaccagcgtcgacctggatcttggccatctcctcgtcaatcttggcctgcgcatgagaaaatcgtatcagtgacgtcccacgcagacaatcgaggctcttcgcaccttcttctccggcttggacttcttgatgtaaggcttgagcttgcccgagatgtcggtcacctcgttgaagaaggtgaactcgcggtcgtagaagcggcgggcgtcgccagagagcgaggcaacgacgcggtcaatcatcttgtcaagcattggcttcatggggtcgggctagggtcgcggtcgttaggtgggtcagcatcgagcatgcggcgtgcgtcatccagcgtcgggggacgtacctcggtcgcgccgtcgtcgcgatgcgtgttggccttcatgttccaaatgatctggtgacagaagagctgggagacctttgacgtctcaaagacgaagcgctcgacgtagcctgagcgagcaagagtaggccggtcagcccgaggcaagagagaggaccgccaggaaggcatctgccacgcaccaagggcatccgagcgcagggcctggacgacttgcgggacgaaaaagaaagtgagctgaaccgggtactgctcgagcacgcgcatggcgtactggagcaggagcgggtgcgacttgtagcgcggctggaagtaggtgacggcgacgaccggcgggacgggcgcccacagcaagagccactgcaggtgctgcttggcgttggcctggattgtctcgccgacaaggaactggagggcctcggggacgtcgacggcgtccttggtgaaggagcggacgagcgacgtcacctcctgggcgactgcagggatcttgacccgctccgccaggtggacagcaatcgcgggtgagaccttccacgccgtccggacgagcttcgaccagggctcctgtgaaggaaggagaggagaagcggcaccatcaggggtctgatcgagcgcgcgcagagctgaatgcacggccagtcactgaccgccgtccggtcgggctgaacgggcatcgcgcggcttgcttcgccgagactattgtgccatacgacgaggcggccaatctcgttctcgacaagaatcttgaggaggtgcgagcgctcattgtggatgcgcgagtgctcctgcagcgtgctgttgtctgctaggaggtacgtggagcgcacgatggtcagtgcggcacgcagtcagtcgagcgaggccgtctcacgcacctggcaacgtccgggcgccgttgtcacagtggacgctcgatacaaagtccttggcccaaatactgtcggcaccgagggcggcgagaacctcctggaggagcttgatctcggcgctgagctggatccggttgcttccgaaggaccacctgcggaggttgcgccgagcaagtcagcggcctgcgcctgtcaaaagatgagcgccgatcgggatagcacacatactgcggccggacggcaaaccaagcgagagccatcttgtacagggcgtcgcggaccttgagctcgaggatggcctccaggtgactgctagcgagcatttgtaggccgaagagcagcaagacaaagcgaggctcgcgggcgagagggtgcgtgctgcatccggacaaggaaggctgtgttgtcagcacgtcgcctgcagccgcccaaaagctgacgaaggccatcgcgcacctcatgtggtcggcatgctcggccgacttcatgatgacgcgcaggaaagcgagcatcaggccggcctcctggtacttgacggcctggaagcggctcgagaggacctggataaggatgaggtgcggcgtcaagagcttcttggccgccgcaagcttcttgtccatgaatgccttgtcggaaggagagtactcgaccgggtgcgtaaaggggtcgattgtgctgcgggtgatgcgcaagaagcgtcagcgcccgtcaccaccgccgccgaggagcgcatcaacgaatatagcatgacgcacttcatcgaggtgctgaagagacccttgcgcgtctcgatcgtccacgtccattgcgagacgacctcggtcaggagggccatctcggcagagggtcgctcgctgacaagccagccccaggcgtccgcgccggccgcgaccgaccgcggcgagaaggcccggattgggatcgaaacgaggtggtgaaggatgtcgttgtcaagcgtttcggacgagacgaggatagctgccgcccggaagaggagccggcggaggtcgggaatgctgaacgtgctcgtcttgtcctcgatcgtcttcgaggccgatgccatctggctcttgagcgcggcaatctccgacttggacgagaagctcggcgagttctgctgcagctcgctgagacctgccgatggatgatgagggagcttcagccaatagccacacattggagcaagcgcggcagacaaaccctggttcaggacaagacggagaccgctgtgctcgccagcaaagtagttcttggccgcgaactggctggcaagtcggttggcgctgtcggacggccagccgccgatcttcggcatgctcgctttcaagaccaagcaccgaggtcagcctcatatctctccagctgagagcctacgcgcgcgctgcaatgactgacactcctggcggtcactgctgctgatcatcttggagtagtggagggcgagaccggcacccatctcgacgctgtcgggcagaaggacgttgcgcgactcggagaggtagcgctgcggaaggcgctcgagcgtcagctgcgctcttattcagcgatcgggtgttagctcgcacctggaggatcgtctggacctcgatcggtgcccgcgagatggcgctcgtcagccaggtgcgggcgtagccgtagagctgggtcgtgatctcgttgcggacggtgaagctgtcggagagttcgagccgtaggtcgatcttctccgaccggtgttcgtggacgggcgagtactcgtcggtgtactcctcctcgcagctgttgcgcatgatggtgaggacctcgagcagcgcaaaaaccatgtcggcgctgcatatgagggagggaaacgtgccgagcagctggctcaggtaggcaaacgagacgtctcggaccttcttgaagcggtgcgtgcagccgacgagcagccgttgaagctcggtcgacaggtgcgggtcaagccggtgcgagagcgagagccgccagacttcgtccttgaagttggcgatcaccttggtcgcgatcgcgccgagcggcttggcgagctcgctctcgttgaggctctcgttcgagaagtaggcgagcaggtacgccggccggccgagctttgaccggcggttctcgacctcgtagatggtctggagcagcgtcacctgcggtaggctcagcgaccggatgtcggccgcgagggccggtatgagcgccgacagggccgagcgccgcttgctgaggacaacgtcagagaactccttgcgaagaatcgagttgtactcaaggtcgcttgagacatagtcagaggctgactcaaggatgagcgcaggcgtcttgagcgcgatccggtcgagcgcggcgacgtgccaatcagtgagcgtgcccgggatgccgaggacgacgcagatgaaccacatgttgcggaacagggcgacgagcgccggcgaggggtcgtggtgcgggttgaagttgcggtggttgaggatggcgtcgagcgggaggagcaggccggcaagctggccggtgaggtccttgacatgctccccactctgccgtttgcctgtgcccttcgatgcagaccgaccgaggtcgacgccgagcggcgaggccgagttaccgctgctgtgagcgacggccagcatctggacgttggtccccttgtcggcaaacagctggagcgtctcggtcaggaaggcgtcgcgcaggtccgtcttgcccttaagctcgcgcccaagccgcgtctgggcggcaaggacggccgcgctcgaatgccgcggctcctctgggttcggcgaggcggagacgagtgtaaacgacttgatgatgtcgatgaagtcggcccggggcgcgatcagcgcgaggtggacgaggttggtgacgatgatggcctcggtgtgggcgtcggccccgcgcaggcgctgcagcagcatgctgacggtgatgtgggtcacctcgggccggttgaactcgagtgcgagccgggtgacgacggcgatggcgctaccgttgacctgccgccgggactcatcggtccgaccgcctccgaagacggtgccggccatcgtgtggaccgtcattgcgtcggacgccttggccgcccgcgcgtcgccggaccggctcgaggccgcgtattccgcgccctgagccgagagctggttcgaggccgaggtgacgtagttgaggagcgagtacatggtcgagctcacgaggtcatctccatcggcggtctgagtgatagcgcagcgtcagcaaacgcagcgtgttgagcggcagaggagcctcggcgtctgctgaccttgatgcagaccgcgaggcactttgctgtcgcagacaggaccgtgcagccctcgtcgctcgacacgtcaaagacgggcagcggcgtggcaacaaagcgccggaggtggagcgccatcggctgggcgtgctgcgggtagctgcgagagccgtgaaggaaagatcagttcggacgtcgctagcagtgagagacgggcgagggacccgacttgtggacgatgattacgaggcactgcagtgctgactcctggaggagcgactcgtagacgggcgagtgctcggacaagagcagcttgattcgagcaaagagcgccgggaacggctcgccaatgacgaccgagcagagcgtggccagacgctgcaatacagaggacgaccgtcagtcgcgacgctttgttggcggaaaggggaagcggacggacgcaccaggctctcgctcataacttcaaacaggtagaggtcggtgtcattggcctcggccttcagctggatggcgtccgcgagcatgccttcgaagacgcccattgcctgctcggccgtctccttgcagcgcacgagctcgccctcgagggctgatgtcggctgctgagcggcctcgtcgcgaagcaggaggtcccaggcaaggttgctcgcctcggcgccgtcgtcgccgtctgggtcggccgggttgaggataggctccttgaacgcctcggagggcgtcaagacctgcgagagcatcgtccactgcatctcctggctcgcgcacacgagaaagttgccgctaagtggccggccgttcgagcggtaccggccgagcagcgcgttcgcattctgccggcgcttggctgcggccagagatccgaggctctgagccgagcgatacagcagactgttgatgtgctcgaccttggacgaggtgaggaaggctcccagtgtcgatgagagaagcaggaaggacggcagggtgaacgagtgcggcgtcgacgtaaacgaccggtagaggccgttaaacgccggcaagacgtgggtgatgacatcctcggctgtcaaggacagatcgggtggacgttcagtaccaagcggacagtgagctccgataggagaaactgctgaccatcgcccttcgaggccctctcgctcagcgcaccgatgaagctggcgatgccgtcaatgacgcgctcgcgcgtcgcatgctcggccggcgtccgctgctccttcggcgtgtcactgatcttgaggagggcgccgacgacggcgctcgtcagctggtccggcagcgcccattcggcccaggcgaggccggcctcaaagtctgtctgcgggatgtcggccagcatgcggagcagcaggtcgaggttggcggccgagcgcggatgcgacagcggcagatgcgacgagaagagagcgaacgaagtgttgatgtgcgtcgaagacgtcgtctgcagagcgtcgcatcacagaaggcgtggaggtaagggagaggagggcagaaggatggtcggcgagataggtcagctcgacaggagaggaggggagacgacggctagcgctcaccatcgtcaacatctcgtcgccttcgagctcgtcgtctgcctcctcagcctcggttcggacacgatcgacgagctcatcggtcgccgtctcggccaggctgcgagtgccattgctcggcccgggctgcgagtgctcgctgctcgaagacgagctcgccgtcgccgacgaagccaggctgcgggcgaggtcgttgaggatgagcgactggatgggtaggtcgaggctggagggaaagcgtcaaagtcggcatcatagctcggcccagcgaggcctcagctgacgacaagcgcgtaccagtccatcctgagggcgatgtatgagagaaaagggtgcctctcgaggtcggcgtcgttggtcgagggcagcagctgcaggggctccccctcgtcgtcccgcagcgacgcagcttccgcggcggtgcatgacggtctcctctgccgaccctgctcgccctcctcccacatttgacaggagagagccctgccctaatcttcctgttctggtgagaccacgcccttcttcttgacattgcccgccgacctatggtcgcttcttgcagctttaagatgggcgccgtcgccttcaagctgacgtcaggacatgacggttgcatgcgcatcgccgttccgtctccaggacagaagctcaagaggcggcatagaacgccagctgggcgtcgaggatggggccgctgacagtcgaggcaaagtcgtcgacgagcgccctcttgagcgcattgcgctcgcgctcgcgtacccggcggaccctcatctggaagccggccgagatgggccgatggtcagacaaagtcggctcgtagcgtgtgtctgccgggttcgggcaatcgggcatcagcttgtgtcaggctgtcagatgaggttcgaatgacgcacaatggagggcctcgatgttgtcgggaacacgcgagcggtagaggatccggtcgcaccacgccggcgcgcgcttcttctccgatgtgtcgtagtcgtgcgtgccgcggttgtacttgtaggtcggactgcaaacaataggaggacgttcagccgggcaagagagaaaggcgagactgggacacgcactcgaaggcgatcggggcctcggagaaggtccggagccggaaggtaggattgttgcgcatctccttgtgaagctggtcatgttcgagcaggtagtcgcgctcgcctgctcgcaggctagaaatgacgttttctctccgcaggtcgatgcggtagttgaggtcgccgctgaagaagcagaagtcgtgatcgaggaccattgagccgtcgccgccgccgacgtaggcgagctcgtcctgaccgaggccggcgacagggaagcgggcctcctcgtctaggataccagccaagtcctgaaggggagtggccaaggttagcagacggatgggtttcgaggcggccacagtaagacgcacagcgttccgagccgtcttctgattctgaccggcagcgaggtggcagttgatgaagcagacgctcgagtcgtcgacgacaaagcggccaatgatggcgcccttgttgccgagcatgccggccatgccgcgcttgacggtcgtgatgcaaacgtcacgcaggttgacgacctcggcgttcttgacaaagatgcaggtgactgagcgcgggcaggcgagcgagccggatgtcagcctcgtggtcggaaatcatggagtactggcatacgacgcacagaggcccacgaggttctgggcgtggacgacggtgtaagggctgtttggcgaaagcgagaccctgatcgcctggacgagcttatcgtgccagagccggtagcgctgcgagaccttgtccgacatctcgttgttcgagcctttggctttgccgaagaggaaggactctgcgaagcacgagagaaagaagggagcagtcaagtcaagtttctcaagagcagacatgatgcgcgactgactggcagcgagcttcttgtcctccagcggaatgatttcctggaagccaaagacgacaatgtcggggctctcctcgctcgtcaagacgttggcgaggaacgaggcgttctcggtcgtgcttgagaggtcggccggcttggccgcgtcgatgttccacgagcacgagatgaccttgaggccgcggtacgagcagaactcagcctcgcgctcgagcaggcgatggtctgcagggccgggcatgggggatggtggtgtcagttgagaggcgcggatgtgcagctcggctgccagacgcaccgatccagtcatcctgcagcaagccatcccaggcatggacgacgtcgtctcggccccaagagtagactttgagcaggttctgtaagcacgcagagggatacaggtcaaccagctgcgggtcagacgagccgccaaaaggcgagacgcacgtcgctaatcgccgtcggatcgacttggaggccgacgaccggcgtgtccttcctgcggtcgcaagacaagaagtcagctgccgaagtctcatcagagcaaggagcttgcacgcactcgtgggcggcccacatgttggtcaccgtccaaggccgagtctcgacgtcgtagatcgagacgacgcccttcctgcttccggcccaaagccgatcgccgacgcccgcgaggctcgtgacggccgtcgtcccgaccttgacggcgccgacgaagacaaacgaccggcggtcccagctcgagacaaggccgccttcgtggccaaagtaggcgagtgccggctgggaagggacgacggtcccgcaaagaatggcgccggtgactgagtcgggcacggaaaggacgcggccggcgacgccgccgccgccgccaccggcagtgccatctgcaaacggctcgtggacgcggatcgccggcgacttgccgcttgctcgaaccgaggtcgaagacgacgacgaattggactgcccagccgaagcccagacctgaccgccgagcaaagccgcaaacgactggcgctcggcgagccggggcatgcccgtcggctggccgagattgtactggccatcggcgtcgggcgcatagagcgctgcccggccgctctcgtcataaacgagcatccggccgccgtgcgaccagatgtgtgtgatttcggcgccgttgagcgcgctgctgctgccgctcgtaccgctgccgctgccgttcgaggaatgatggtgatggacggccggcttgacctgggtgacgaccgaggaccagacgtcgacctcgaagatgtggccctcggacgtccccgcccagagccagcggttattctcgccctcggcccgactcggccggaagcacagggcagagacgcgggccttgtcgctccggacatcgagcccggcctcgcgctgatcgagccggcagaccagctcaagcccggccgactcggcgtcgtacacccgcaggccaaacgagccaacagcgacgaatcggtctgcgcaggcgaaagccgacgggccagcatgagtatggtggccagacgcgtttcggatcggctgcggccgatgagcgaggtatggcggtcggcggttcgacagcgtcgggtcggggtattcgtccatcttccgctgggccatcgaggtcgcacgactgaggccggtgctgccgccggccggcccatgcagcgataagccgtcttcgtcctcggggtccgagtcgtcgactgccgcgccgctcgcctcatcctcatcgtcgtctgcctggccacctgctggctgccggccagccggctcgaccctctgaggaggtgggggcgggatgtagcccgagtccgagctcgagccgctcgtcggccggctcgagctggcggaggcggccgtcactcggctgacactgcgagcgacagccctgaacggcagcttgccttcccgagcgccagtcaccctgttcagcggcggtggtggtggtggaggtggtgggggaggaggaggcggcaagtgagtgtcctcggttttgccttcgagacttggaagaacaccgacggcgctgagcgtacgcgaccgctcgggcagcggcggcggcgcgaccggcctcgagtcgacggcggcctcgagcgttggaagcgcgctcgtcccccttgccggcaggtcgggcgcgggtgggccagtgctggcagataactcgtcggtcggcgacgatggggctgacggcttacgcatcggcagcgccggcttgatcggctgcggcgagacggagagcggcggggccagcccgttgtcttcgtcgtcgccgtcgccgacagccaaaaaagtcgatctcggcggaggaggtggcaggacaggcggcgatgttgatggcggtacatcgatcgcgatcgttggtgatgcgccaccttggacgccggcggaagacgttgtcctgctcctcggccgtcgcggcacaggtggcggcggcggtcgtccgccggccgactcgtgctcggccaattccctctccggctcgtgcgaagcccttctcaacgagcgcgacgccggcggtggaggaggcggcgctggcgacctcaacctctgcgacgcctgagcctgcgaccggccagagggtgagaggacctcgatctcggcctcgaggccagcgcccgagcggtcgttgacgtcactttcgggcccgaacgcgaggagcgagggcaccctccgcgtggctggtggcgggggcgggggtggtcgagcggcggatgccggggttgagctcgaggtcgggcgattgccaggtatcggaggcgggccagcgggccgagttgatgcggcgtcagaggggtcacccgtcttctcagagcgaccttcggccgctgccattgtcgagccggacatggtagaggatggcggcggatgaagagaccggctcgacgccggcaaactcggccggccaagggacgccgtccgttggctggctgaaggcgtcgtcggtcccgaccggcttgtcgtcgaaagtgaaggcgcgtcggaggaggaatcaaaggcgactcctgcgaaccgcgaccgaagggtaaacacggacgccggctcctcctcgggcgaaggaggtggtgagggtgcgtgggctggagccgcaggcgctgcctgtaccggcagcgatgcagcccctgcagaggccgaagggcgtcctacgttgcctatcacaggtgctagaggaagtgcggtctcgacaggctcctccttcgtcgtctttggcggcagcgctgacccggctgacgcggtcgatcggctggcgaccgagatcgctgctggcttggtcggaatcggcggcggcgggcccttcttcgaagcggctgcagcgccggacgtcgtagcttcagcgcgagcgtcctggcccttcggcagagccgagcctgtcgtcgagagctgaggcagcgcttctgtcggcttgcctgctggttggccggcgggcgcagcaccacccttgctcgcggccggtgacgacggtgttcctcccgccgccgtcgccgacgctaaggtagacgacgacgcgcgggagagctgctcgaaccgggctttgagcgaggagacggcgacaggctgctcgtcattttcggcttctggaccgggcggcatggcggccgggaggagcggcgagcgagcgagcgagcgagacgctgggagggccgttggcggccgtggacgagcgaggcgagccgaaagagcgggacggcgggcgtctatcaggagagcaaccaagttcagtccaggactcgctcttagcaagcaggcgctcagagacctactctaggttgaccggcaggtgcagaggtcagggccagagggacgatctcgtcgctcttgcctgctggccgggtccgcctctcccagcccgatccttttctttttttacatcccttctcctctacgcgtctgcctttgcgccggctgcttgttgtcgcgctgttcggtctatcgctcctcttcgccctcccctcatccgacccctctcctcaacactctcaatccagcagaccgacaccgacgcccacacacggcaaacacctcagtccttacagtactttccctctctctgtccgtctcctccggaccgaatcacaccggaagcccctccctctcttgcccctccgaccacccgccttccctccctcaacgatgcgctccaccgccgcccttttctcggccgccgccctctcggccgtcaccctcgtcgcagcccacggcgccggaaacaagcacgctcacccggcccggctcgagaagtcggacccaacgaccgagggcgtccaattcagcctcgacaagcgccaggcgagcaacgcccgcttcacctactacgagtgcgtcaccgccctctcttgctgtccatcctcagcggatctgatgcaggtcggatagtcggcgctctgcgtttgatgcgccgcctcttccggcctgatcactactctccgaagcatcgtcttcagcgatgccgacagtcaagctgacgcgcttcaccttccttttcgatcgacctcagcacctccgtcggtgcgtccaacatcgacccttcctttttcggccacctcgtcattaacgactgactgctgctgctgctccttcctcgatgtgatctcaggtcttggcgcctgcggcaagtaccacggcaacgaggaatacgtccgttccctgcctcatctccctccctttgatccttttccgaccaaacctcgctgacccacccttcttgttcgcccatcagacggtcgctctcaactcggaccagctgaacgctgccggtggctactcgtcgtacccgccttcagtctgcggccggtccatctcaatccagtggggcggaaagaccatctctgcgacgatccaggacggtacgtcgcttttccttggcatccgcttgccaccttttgctcatgtactgacccgctccatcacgtgttcgacagagtgcccgacctgcccgtacggcggcctcgacctctcggcgggtctcttcagcgcctttgcctcgcacgacgttggcgttatttacggcacctggtggtacaacgacggctcgcaccagcccgaggtgaccaaggaggagcccaagtggacgcctcccgcgacgacctcgacgacgccggcctggacgcccccgacgacgtcgtcgacgcccgagtggacgccgacgacgacctggacgccgcccgcgccgacgtcgacgtcgacctcgtcgacgccagcctatacgcccgagccgacctcgacgtccgtcgcctccacctcgtccgtcgccgcctcgtcctctgctctcagctcttcgctcgcctttggcgcctcctccgtcctgtcttcgggcggcgcctctgccggcgcgtctggctcggccgctcgctccggcgcggccttcaccctctcgggcgctgcgtccgccgcggcctcggcgtcgggctcggcttcgcccggcgccagcgtcaagggcggcgaggtcctcgagaacaaccttgagatgatcggttcgctcgttgacctgatgggcaagaccgtctgcaacgccaacgccaactgcgaggcttaaggcaggccagcttcccaggcgcacaccatgcgctaatggagagaggcggagcaattggccaaaccgagctccgccgacctcttcctgtataccctccctctcgtcgatcgcgcaaccagacccccccactgtccataacgcccttttgcttgccccttcctcgcacgcttgcttcagcccgctttctcccggaccctttccccctttacatcgcttccagtctaaaccctctcgctctcgcccttcgcgcccacccgggcgttctccccctgtctgtccagatccgccctcttcccaccctcggaagtcggaacaggagactggcctctcctcttctgacggcttgccctcttgcggcgcctgccgtttcctccaccgtgatctttgattgcccttgcttcctctgatcgggtcgcacaaagcgctgtgtagaagacatcctcgagctcatgcaagccggagctcgacgtccgtttgcggcggttcgtcgacaggcgccgccgtcgtcgctgaaggcaagggtgtcgacattgaccttgtcggcggaagctttgcccagttctgcgcttggagctggatgaacggcaggacctggctctcgtgcgtcgccgtcgtcggcgagaatgatggtgacgagggctcgtcgctcagaatcgaagatgcggtcgacgatgaggccgagggtgaggttggcaacgaggggagcgtcgacggatcgagccagccacctcggagaccgattgagatgacctgctggaggacgacttctaaccgttccaacctgagcggggcgcagatgaaggagtgaaacggtcagcgcagcgcagtgagtgcagcgggcgagggaccggcacgcccgactactcacttctcctcctgccgacggatcatatcctcctcgctccgcccgcgctcgtcgacacccttttgaaattcgagtacgcccgcctcgagcttctccagccggtcatcgacgtcgtccctcctcttgctcgccgagcgcgagctcctccaagcctcgccaacgacgaggctgacgcctacgaagaagaggaagccttcggctaatgctgttgcaccgttcgtgatggctttggtgtcgttgaggggtcggattgaagctttggcctcgcccatgacgcctgtccgcagcttgacctcggtctggtgcatggcctaggcagaggaggaaggcgagatcggtgacgccggtcagttcggtcagctcgcaagcttgacgtccgtgcaaagactgggaatcacatacctgcgcgagcgagatgcagaccctcctgaacgactcgtgctcctgggcctgctgcttgagcttgttggcaataggctgagagaagaggtacggacacggagtcagccgacgagctctcgagaggcgtcaccggcaaggcgagcagcttcggacctttgataccgtcttgatgaagagcgaggcgatcttgacggaagcctatccgtgtgcgagacgacgacacaaagagcaaagggtgagcaggtcagagtcgaggaaaggtcgtcagccggcgcgtcatgacctgagctcggaggggcgaacggcagccggacgcaccatctttggagggtcgagttgagagaagctgggagatgatgaagcgagaagatgcagtcgaggacgaacgcgagaccgagtcggaaaagcttggccggcctgtctagcgccttcagcagctgatgatgggagacggaggacggagctgaaggcgaaaccggagacgacgacacgaagcggcggcaacgcggcaacgcgcggacggccgacacctcggcgcagcgcgacaggctcttttgacgccgcctctcgggacacgtcgcacgttcttgcaggccagtcttgcatatggtcaggaactgagactactacacgggggcctttcccccgtgcccacagtccttcgcgaggaatgggacaccctcgcccgctcgcacccagaccggctcaaggttgtctacgcgctcgacaagccgcccaagggctgggccggcccgaccggctacgtctcgaaggagctgctcgcaaagaatgccggggccggagcggggctcggcgacaaggtcaaggtgtttgtctgtggcgtcagtcccggttttcgcttttgtcctctcttccttccgcatcccccatcctctgccgccgccgcctcctcctcctgctctttctcctccaccatcatttcaacaccgcctcacacccctcattacacgtccgcccaacgaccaagctgaccttcccctccccccaaaaattcccagcctcccggtcaagttgccgccatcgccggccccaagactgccaagggcggccagggcgagctcgccggcgtcctcaaagagctcggctacgaggccggccaggtcttcaagttctaaacgtggcttggcggcttcgcactgtagaaacgagcggatcgctgaagcgtcgatcaagggccctttgggactcgggagacgacggcggccgttagaatggacgactgtagcccttttgcccctctttccctttagaatgcctggtgccattactttcgttggcctaggacgaaaggcgccagccaagcgaaagcgagccctaccgacgtcgttccaagctcaataggagccctcgcatgtcgggctgaaagacgcatcgaggaggcaacctggcgtcctgccagccgccgccgctggttgggatcgctgcccctctccctctgcaggcaacgtcgcatgccgcccggcggctcgcaagacgatcgacccgcaagtctgtcggtcaaagaccaagcgagaggtgacgagggtcatcaaagacgacgaaagctgcaggccagctgcgggccaactcgctcaagcgtcggcaacgccgtcgacctgcatcggctcgacgttgcgcaggcgccggccggcgaggtacgctttgatctttgccttgagctcgacgtctgagtggaggcgaaggaaggagagaggggggaaggggggtcagtcacgcaggcgcgggcgctcggctcgggacggctcgggacggctcgggacggacccgactggcactcctcgagcttgagcggcatccggttgaacgggtcggttgggtccgagagcaggtgcgacttgatggtcgagcggtcgatcgtgatcttggatgacgggagcaggaccgggtcgcgcatgagcgtgtacatgagcgggtctgccgggcgcaaagaacggtcagtccctctcgacgaacgagcagtagacgagaggcggcgcaacggaccgaggaactcgtctggcaggtcctcgccctcctcctcggcctcaatcttgagccgcgtctcctcgaccttgtcgcaaaagaggacaatctgctggatctcgccctgcgtcttgacggcccgatgctggaggatcctcgcgaggctcgcaaagacctctttgcggtacgaccggccctcgcgcgcgaccgcctcgacgaaacgctgctcggtcccgaggttgcggaagatgtcggtcaggtcgccgaggagcgacttcgcgtcaaaccggtactttttcgggtcgcggactttgagctcctgcatctttgggccgacgagcgtcgccaggttgaagcagagcatcgccgcgagccggtcgattatctcggccttgaggaacggctccttgacctgctcggtccactctttgaggacggcaatgttgcgccggccgccgtcggtcgaccacgccgcctggttctcggccgacttgagctcgtccgtcttgtccttgcgctcggtctcgtcccgccgggcccagccggccgtgtcggccatttcggtctcgagctggtagattttcgtgagcgacgtgagcgactcctcgagcaggaacgtgcagtcgttcatgtgcatgttggcgaagacgacaaagcggtcctcgttgcggctgcgggcgcgggcaggcgttgcgtgtcagtcaggtagtcggtcagaggacaaccgtcccggacgcacatcgagtccttctcaaacgcctcgcggtggaccggattcttgaagaggtagcgcaggattgatatggcatggcgccgcatgctgaacttgtcgtaaaactgctggtggccgccggtcgcctccatgtcgatgtagtaggcgatgagcgagggcacgagctgctcggtcgcgagcgggtggaacgccagtgccgggccgaggacgccctggcggtatgagccccaggcctgacagcccatgctcaggaactgtagaggcagaggacgatcagtcgggccccctctctcctcattcagctcgcagctgacgcacctcgaccagcttggccttgacgaacggattcttgacgtacttgccgctgaggaatgtgatgatgaaggtgatgagtttggtctggtcggccgtgtcaaacgtctgcggcgcgtggctgcgattttggtgagaaggtcagcctcgagccctgcatcaagtcaagagtccactggagcgggcgacggacgagatgagaaagacgtggtagtcggcaatgtcctcgagaatgtactcgggcagcatccggaagttgacgggcgactcttccggcagcggcagccttcagaggggagcaatgtgagcagtcgacctgaaaagcgagttgacacgtaggcagacgcacgagatcatatcggccggatagcgcgacgtcgggtcgacgagccgcacaaaccacgtcatgacaaacgtctggaatgtcatcgtccgggcgatgaggtccgggtcgagcaactgggcgtcgaacgcatggagcgaggcgtggatcgacttgagctggtcctgaagtgtgccgcggcggtcgttcgaggtgtcagtcgtccatcttcacttgccaccaacaaccagtttcgctaagcaccttgagcttcttcatcagcgcctcaccctgctgccggacggcatccccgcccgtcttccagctgtcgtccgcctcgagccgcgaaatgtcgcgctcgatatctccaatcttgcgctcgagctcgttccgcgtgccgaccgtctttccgaggccgacgtgcatgagcgcgcacgcgagccagaagacctcagagataaagttgggcggcggaccctcgaccgaggccgaagggtgagcggcggcgtactcgtcagcctcagcctgggtcgcccgcaggcgcgtcacgtcgccgaggtcgacccgcttcgaacggagaaagtagtctgggtcgaccttatcgagcttgctaaaggcaacgtccatgaacggctcggcaaagcggaggacgacggcaaagacgttggccatgaagccgtcggacgagacggtctcgcgcggcacccgggagcctgcccggcgcttgttcgcctcgatgatccgggctacaaggccgaggaccgtctcgcggccgaccgggcctgaccgaacaatcgcgttcaagacgccaaagagccgctcctgcagggtgaagagcgaagcctgcagcgtcttctgcgccgccaagatggtcgaccggtcgcggtcggtcgggttcgagaagtactcgcgcatgatctcgggctgaaagggaagcaggagccggtcagcttggccgggcagatcgacgcaggatccacgcagatgcgctcacaaattcgcgcgggaaggtcgagagccgtaggaacgggccgagcagcgacatgaactcgatctgcggcgctgtcgccgtctcgagcagccagatcggcaacgagcccacctgtcgggccagaggtgcgaggatcagtcgaccatttccacgcatcgacagcagtctctcagccgaagcgcaccagcccagccgtctctttgctctgcgtgacgcgctcgatcgcgcccaggtacttgtcccagtcgccgccggtcaggctctggttctcggccttctcatctggcgtccagaagcgctggaagacagccgccatcagcgggctcagcaccttctgcgcgaactcggccggctcgtcgccgtgcgttacgaggtccgagagcaggagagggagatacgttgctgggaggagcggacgcttgccggtgctgtgcgccgggtcgagcaggagagggaggagctcgagcgggccaaccggtcgctcggccgtcggctccggctgggggaacatgcccgggtctttaaggatctcggacaggtagccgacgaggccgtccttgacggcccgccacgtcgccttccaacgctcggcctctgccggcgtgtagccggccttgaccgccgccggctggagagggaggagccggccatagcatccgaggaggtaggcggtcgccgtctggcctgccggcagcgcagccagtaccgacaatgtcacgagcgactcggtcattgtcgccgacgggtcgagcgagagccgagcgatgagcagcgcgtcgattgagtcggcagggaggacgaccgtcggcttaccctcggccttgaggtcggccgcgacctcctcgagatagacgaccgaccagtcggcggcctcggcccgctcctgactcacggtgacgttcaggacgcgctcgacctgctccgactcccagacgatgtacggccgggtcggctttgccggcggggcggcaacgcgcgctgcgggccgtgcgacaggggtcgccgtcgctgatgaggtcgaggccgcagtcgacgacgacgggcgcgggatcggcttcaagacgggcgccagcgaggccgacgttgatgaagacgatgacggcactgctggccgagaggacgaggctgcaggaggagctgtcgaggcggccgacgaccgtgcagcagcagcggccgcggacgcgctcaccgaggtggacggtgcggccggcgtcggcggtgttgcctcggccggagcaggagaggcaagcgagatcgccctcgcctgggcggcgagcagagccggattcggcgagcgcgacccttcagcgatgtctgacggcagcgtcgagccggtggcagcagctgcagctgcatcggagggcgagggggtgtcctgctggagcgcgagcgcctggaggcgtcgcaggcggacctgcgaggagagcatgcggatcagctaagaaggcgcgtcaggaccggttcaagtcgagcgaaccttccatgctggctcttccgacatgatgggtccgaggtttcgagagtcgtggtcggaagacgagatggcgcaggccaggcaaggcaggcgaggtggaggcgaactggcagaggcggcagcggcggcggcgcgcagggaggcaagaacctgcagacggagttgctgctcggccgacgacccctgaccgcttccttccctccctctccccagcaacgctcagggatgtcgaccatcatcgaatccgtcctgcgagacccgcagcttgtccaggtcagctgtccagggtgcgtccttccttgtcaggcctgggcggagggccggcggcgctttcggctggcccgacaaggcgcccggagcctgtgcatgtgcttctgcgccgccctctcgctgatccttaagctgcacctgctgccggtcattgtgtcgttgcagctgcaaggccccgcttgagttcaagtagtacgtctgactggccgtctctgctgccctttgtttgcctttcgtcggcagcaggaaaggtgtctctgtctgccaggctgaccatgacgttcggctcgcgtgcctcctcccgcttcctccctcttgccagcccgacccctgcgcctcgctcggcccgcatccgatgcgcctcgccggcctgcaaacggctctttgaccctccctcagcattctcgtcgagcggcgccgccgacggcaagtccggcgcggcctcgggcagcggcgccggctcctcggctggagcggcgcagcggaggatggggaccgacgcccggccgctcgagacgcgctactacgacgtcctcggcgtcgactcgcaggcgacgagcgacgagatcaagaaggcctaccggcggctcgcaattaagcttcatccggacaagaaccgggacgacccggacgcaggcgagctcttcaacgagatcagcgtcgcgtaccaggtgcgctcctgggctgctgagctctcacgaaccgctttatgcggctgacgctgaggcccttctctgccggtgtaaaagacgctcatggaccccgaactgcggagaaagtacaacgagcgcggctcgtcgaccgaccaggccggccaggacggctttgtgcgtgtcaaagcagcctcgcgtgagctcccgcccatagtgacgctgacagtcctcccgctctctgccgccccaggtcgatcccgaggagcttttttcgacgctctttggcggccccaaatttgaagacatgattggcacgatttcgatcggccggacgatgaaggagtcgctccaggcggccgacggcgacgagggcgacgagacgcccaagcaggtgctcgacgaaaagacgggcaagctcgtcgtcccgccggccgaaaaggagcgcgtcgccaagctcaaacgcgagaaggacgagaagagccaggccgagcgccaggcgcgggtcgacaagctcgtcgtcaacctcgaccggaagcttagtatctttgtcgagggcgtccagggcgcaggcggccaaaacgaccggagcgaggaggagatccgccagacggagcggctcgtcggcgagagcttcaaggtgcgttctcctggcacttcgtctctgtcgtcgcctgcattggctgatcccgcctcgcgccctctgcagacgatgtgtgcgctcgaggcgtccgagctcgtcctcgagtcgtacgggcctgagctcctgcagtcggtcgggacgacgtaccaggcccgcggctctcagtacctcgccgcgacgggctcggcctttggcggcgtcctcggctggttccacggcgccaagagcggcgtcaacacgttcagcgagacaatctcgctcgtccgggcgggcctccatctcaagaatgtctttgagaagctccaggtgcgttccgctatgcgaggctgatcgatgtttgaagctgacctacccgctccaggccgccgagaagctcggtctgacgcccgagcagatgaaggcgctcgaggaggaggccgcgcaggagggcctcaagacgctctggaagtcggccaaaatggaggtcgagagcgtcatccgtgcgcaccctcgtttggtctgcctcgtatcgatcgcctactgacccttttccaaactttcgccttttaggcgagacgtgcgaccgcatcctgtcggacccggccgcgtcagcagagaagcgcaggctgcgcgccatcggtctcgagctcatgggcgccgtgcgtgccggctttccgactcgctgcatcatcgtccctgctgacctgcgcgctgtccttgtccttacaggcttacctgacggcgaagaaggacaccccagaagacgagtttgtcaaggtcgagacgaaagcgtcaaaggagcgcgaggcgggtgccgccgcatgatgagggcggccgctcattgccccatcgagacgattgacgaccagcgacgacctactacttttccttctcctagctcacgcccatcttagcccctttataattttccaatcggatggcctcccagcttgcttcgcatgccgtactgccctgccccggaagtggccgccgcacagcagaacgcaaaagatatgcgaaggcgcaacccgacccatcctctcgttcacatgcgtcatgatcgcagatccaccctgctgacgtcccagcgcatccaccagccgtttgtccgccgcttgcgccggccgagcgcctcgcgccacgacgcctcgtccgcctcctcgtctgggcctacgagaccctcgatcaggcggccctgccacgtcggcgagacatcgagcgggcccgaataaaagccgagcttggcggcggccgtgaagaagagatcgatcgacgactgcggggtgtagtcgcccgcgacgatgtctgtcgagtgcaagtaggagctctaatcagcgtcgcgaaacgggggagcttcgaatcagagacgtctggcttcacgcacagatggacgcctccttggtcttggcaagggcctcgctgcacgacttgacgaggtctgggaggttaggcgtgagccagagaaggtccgcgaggaaaatgaggtcaaagccggtcgacgggtcatcgagcgttgccctgggggaagggaccgggcaatcagcacggatgcaagaagacgaaacgtgccccttcgtttgacctacagtaacggtgcaacgtcggctccccactcaaagccaagccaggcgaccttgcaaccggccgtggccgctcggaggttgcgcgcgacgttggccgcgaggttgtcggtgatgctccggtcggggtagtcggtcaagagcacgctcttgggcggctcagccgcggttgacgccaggagcgaagggagaccagctccggatccgagctcgagaatcgtccggccggcaaaggggattgaggcgaggtcgaccatctcggcgagagcctggcgggcggcgcaggaggtcagcctggagctagagcggaatttcgcgtccgagctacgacagacgcaccacgcccgaagagaaaaactggtcgctcatcttgtggatcgcctcgcccgctacgagcagcaaaggaccggtcagcgagcggccagggagggtcgaaggggcgagggacgtacacttgggagctgccgtgacggcaacggagccgaagcggacgaggacgggcgtgtggatgatttcgcgctcgccctggagttcagagaaggaggcaaagatgtcctcgacgtcgtcctctgcgttgtttgacatgctgagcggcggaggaagggggtccagagtgttgagggtggtggccgtcggaggtcagaaacgccgggcgctggccgcgcaggtcggagtttcggccgcagcagcgtctcttcgtgcccctggtcgacaggtggagactcgggattgttaagtggggcagtgcgctctggtcagagagccgagcagtcgattcctcaggtgctttgggaggcgaccgcttcaaagggattgagttattggataccgaccgcatttacatgcagtctggctctcttcacgcggcctcttctcttttgttttgagcgtctgcgtttgcatgggattctttagtgaatgcagggggatcttgtccttgttccgtttccatgctcagtaattaagaaaggagttagcgaccggaagggggcgatacagagcacatttctcaaccgcgcacggacctttcatattaatatattacgaagaaaaatcaattccataaaacggggatttagctcagttggtagagcgtatgcttagcatgtataaggtcacgcgttcaattcgtgtagtctccaaagcatcaattttttgacggcctgtcgagtcgatcgagcctgttttgaatcggcccgctgtgtcgagccttcacgctttttgccttataggaggccgtcgaatactccgccggcttctcttccactcgcagcggtgaaaatcgccgcttcccccgtcgtaactgcgtcgcgtcggtcgcagcttggcagaaacgtctgtcgagcctcgggagtcacctacatggtgagtgcccttcaatcagctacccatattgcagcagctgaccagctttctggtcccactggctctcgtgcagagtgtctcacgaccatggtcgtgctaatcatgatctcgtccgttgggagccgcaattcttgtggatctgcggcgtacgtccgactcgttgcctcccctgcgctttcttttcgctgaaccccctccctgtctctcgccctctctctgtcctacaggcctcgttcggtagctgccatcaaggacgtgacccgtcttgggttggaagggtagtcccaccaagttagtcgctccctttctcatgccgctcgttcgtttgattagttgacgccaacacgacttcccctaccgcacgcacagccgatgatcgaagtgcgcacctccctactcgcacgcgacaccccgtttctgcccctcgacgccctcttgtcctcgcagctctctcaaaatcaaaatctctcctctgaccgtcgccttccgtcgtacaacttgctcctcccctcccaaccgatcggtcgtgcgtcttgcttctggtgctcgatccaatgactcgtgcactgtacttctgcgcgacgcttttcggtcgattagtagattgcaggtttgaggtacagccgagaagtaggagcacggcgcgaggaagggaggagggaggcggcgataggcgcctcgagggaaaaagagaccagagcaaaggtcaaagaaggaaagatgctgatatgcgcgcacgcgcgcgagagcagggtgaagtggctgcgagcccggcctgcagggcagggcaggggccggcggcgagtggggatgcgaatggctgtgcgagggtgggtggacgaacactgaacgaggagggggaagggtcgacgaggagaagagcgatgcgccctacattccttgctgaaagagggcgataggtgcgacggatgaagcaaaggaggagagggaaatgcaggcagctcagtcgcggacgagctcggacgcccggttgaggacgtcctcgagcgaccagcggccgccctcgggcttgccgtgcttgaggtcgaggatgtcgccgacctcgtcgcaggcctggaggatcaggtcgatgtcggccttggtgtgcgaggcagagcagcagaagcggacgctgtaaggaagagggatggtcagcgacgggcgggcgggcgaacgaacaaggcaagggaaggaacggaccgagacgacggcagcggggtcgccgggtagccaacgatgacggtgacgatcgggatcgcccggctgctcatcatccgcgaaaagagcggcatctttgccgggttgaacgtaaggagcgggacgatcggcgagtcgcggtggccgtagacgatgaagccgagcttgcgaaggccgcacgagaggtagcgcgagttgaaggcgaggcggcgcagccggtcggtaccctcggagccgtcgagcaggttgggcgggagccggagccaggccggaaggagctgggccggcgccggtccgtaagcctcgtgcttggtcatcgaggctgggacgagcgcgttcgagggctgaccctcggcggcgccggccggcggcagtggaggcgagacgcccatgatcgagcccatcgaggcgacgatctgggtcaggaccgggggcgcgatcgcctcggcgtagcacatggcgtgcgaccggagccggaggagcgagatggtctcgcggctgccagcgacgtagccgcctgcggcgccgaacgactttgtgaatgtccccatgaggatgtcgacctgccgcgggtcgatcccgaagtagtcgcacacgccacggccgtgcgggccgagtgcgccgatcgagtgggcctcgtcgacatagaggtagaactgaagcagtcggaagggagcgaggaatcagcatctcggtgcgatccgtcgaaaacatgcggatggcgccgcaccttgtacttgcgcttgaactcgagcagcttgggcaggtcgacgagcgtgccctccatcgagtagaggccctcgaccgcgacgagaatcttcttccaaggccggtgcgtccggggctggccctggctgatggcctcgcggaggaccgcctcgaggtcgtccatgtcgttgtgcttgaacatgcggacgctcgcgccggagagccggacgccgaaccggatcgacgagtggttgtgctcgtccgagatgacgaggcagcccttggagacgagggccgggagcgtcgtcgagttggtcgcgaaacccatcgagacgaccatggcgtcctcgtggccgaggaagcgggcgacgagcgcctcggcctggacgtggaggtcgagcgtgccgccgtcgagcctcgagccaccggccgagacgccgtagcgccggacagactcggcgacagcgtcggcgcagccgccggtcgcctgggcaaagccgaggtagttgtatgacgagatgttgagcgcgcgcgtcgtctcgcccgtgtattcgtacgtcagattgccgtcggtcgacgaccggtcgtacgtctgaatcgtccggccggggacgcccgtcaccgggtgcgagaagcagtcgtcaatccgctgcttcagccgccgggtgtagaacgagtcaaagtccgagttgagcgcggcgtagccctggcagacggcacgtgaggtaagggagatggttagcctgccggttccaagaggggcgctcccagctcgcccgacgcacgttgtgtgccatgaggtctttgaagtcggccgggaagaagcgcttgccaaagtagtcgcggatgtggccgatgaagatcaggatcatgtagctggagcggggcggagggcgggagcgggtcggttgggtgtcagccagggagagccagctgcgggggagagaagggccgacgcacctgacgtaggtcgtcaggtagatgtagtagggcggctcctcgagcttgttgtgcaccggcgtctttgcattgtactgcgaggggaggagagggggcgatggtctcgagtcaactcaagccgcctcgacctggagcactcgcagacgacgcacctgcgacgtgtgccgccagtctgggtttgagcaccagccaaactctgcgtgcctaaatgtcggcacgccggccgtctttgtcgaatagccgaccgggtcgagcagctggtcaaagccgtcgtcgcccgggctccggaggtggacgtcccggcccgacgggacggcatagtcgtcctcggcccgatggatgctgattgtcgggacgtcggcggccgtcatcgacgaccggccgctgcgggcaacccggaggaggctctcgcgcgccgacatgggctggtgcggctcggcggcggccgcgggcgaggcggcagacttgtgccggaacgagaagcgcgagctgctcgtcgtcgtcgcggcgggcgacgtttgagtggtggacatggacgatgacttcgacgacgatcggttgcggaggatgggcatccgaaaggtgcggctgggagggaagggaccgtcgagagcgcgccggacacaaggagaggtgaagcgagagcgagcgcgacggggtgtgtcgtgcgaagctgctcgaaaggggggtcgtcgaccggcgagacttggagagagcgcgtcgaccaaaggcgggcttgaggatacgagcgagcggagagcaagccgggcagtcacggacggaggatcggttggcgagaaggcgagtgggtgttgtgtgtgggcgactgggtgctctcgatggcttgaggggcgcggcggccggggcgcgaaaacgacggggcagacgcgcgcaggcgcgacgcggcgaggcgagaggagggcgaggcgagcgaggcagtgcaagcgaggcgaggcgaggtgcgttacgctctcttgaagaccggctggctggctgctgggatggtggttgaccgaccgaacgaaaggccttagacgaagctgacgaggaccctgcagcagaggaggaggagcaggcgctggtgcagccccttgctcaggccggcttaccacgccccctcggccgcctgcacgcgcgcgcccgcccggacgccgctggccgatgccgcaggcttcaaaaataaacgaatctagagagccgatcgatggaccaggcgtcgctgacgcgtttcctccgcaagagcgcttccgtctctcgccgttcagcggcacatgctgacctgccttgagtctggccaagccgatgcagacgagccgcgcaggcgagggaaggggccggaatatatagagagcgatcgaggcgcaggggtggcactagaggcaagggaggagagtcgaacgcgaaagaagaggttacgctagaagaagtggaaggaccggccgcaggaaacggagaaggataggtcacgcatctaggacgggaagggcgagactcgcctcgcctaggtgaaccaggcagcgaccgttgcgttgatcaagccctcgccgagcgggcacgccaacgccgtctcgttggctccacctccgacgaccggcgccgtctcgttcgccgccgccgccgccgtgctgttgaggtagctgagcgcgagcggatcggtcgtgtttagcaggacggagggcccgacgaggaggttctggaggtgcgtcttttggccttcggcgtcggtgatctcgaagaacctacgcgagacggaggatgggaggcgagggttagcaagaagcgtccactgagtcctgcccacgctcgagctagccttctgccttgacgacagggcggctctacgcacatcgacgagttggccggttggttgacgatccagaaggcggacgactcgccgctgatgttggcaaacgtcgcgaccgggatcttgccgacgtagtagccgccctgggcaatctcgagcgaatagggctcctgagagtgagaagaaggttggaaaagggcgggaaggggtgtgtcagtcagcgctggctctgagacacgtggcctcgggtcggcgccagacagagggcaggtgtgaagggacggacgacgccagggccctcccaagagatgttggcgacgccgcactgcgtcaggtttgagacggtgagggtttgaagggtgatgggcgcgcctgcaggggaggaaggcgatggcagatggcgggttccgggagcagaaaggaggacgcggcgagggaggaaggcgttgcggggaggtgcgagcgcgggcatgtcaggagagagaggcagacgggtcagtcgttgtcgcgagctgaaggaggacgtattgagctcaaggcaggactgaccggcacggggcaggagcgaaggttcatactggttggcctggaaaggaaggacagcggccgagacggcggcgagcgacgaggcggcgagggcgaggcaggtctgggcgagcatggcgggcggatggttgagaaagagagaaggtggttgttgatgggcagacaaaggttgacgacgcgttggccgtcctcctttcgaggtcagaaaaaaagagctaagggggtcggtgacgaaagatggtcgtggggtcggcgtgcgtggtcggccggcagggggctgaaacgtccgggcgcagaagcggcactgcgggcctgacgcgacggcctgcccgccctcgccggccctccccatcgactggcaggcagctggccatgagcagactgatgccccctctcgctctttgccatccttcgacggcacagacgttgagcctttggcggtcatgactggccggcggtgtgtctcgcgtctccgactcagcccacgtcgtcccgtctcgcgcgcgcgcccgtcgatcctcctccagtcgacctgacgcctctccgaagctcccgcctctcgcgccaaacgtcgacctcgaagacgacccgacagacagacaaacactctcgcctcccccccccccgtccgcaacgatgctcagcagccccttgacgcacgcccgctcgcgctcgctctccacaggcggcggcgccggcggccagccgcccctccagcacgcccggtcgctctcgacgggcagcgtctttgccgccagcagcagcaccggccgctttgagccgctctccaagctcgagatgatgcttgtccgtcccgcgccttgcctgcgagtactggtcgctcttgagtgcccatcgctgataaccttctggcactgctcggaccgaacagatcgcgggctcattcgccggcgtcctcgtcgttggcttcgtcgccgccctgacgaccatcttcgactggcgctggtgagccggcctggcgtgtctgacggtcgcactaccttcggccggccgtcgaggtctcgcagactcgaggccgaccggcgcctgcttaccccccggtcggtggcgcctcgaacgagcggcgcttccatccagctgttggacgacgcaggaggtcggctccgccagctctcgactaccaaatcccggccttcgccggtccattgggacccgctcaatctccagccgcgtccatcacgtcgcctatggctcgccgccagagcccatctgctcacggcgcgcagcgttccgtgccggtcgctcgactgccggcgctcaactctcggccggctgcaggcttcgcttagcctcgccaacgacgcaagatggccgaccgacgacgaataagacgatacgagggctggacgaggtcgtgcagctcagaagcctgccggtcgacggcccaagtcaccgtcaccgtgcgcgaggacgccggccaagagactcagcccggcgacgcacgcgctctttaggtcagcgggctcatcgggccgagctctttcggcgctctgccgcaacctccagtgcgctttgtcccggccagcctacgaagggaggatggcagccgtacgatcctgatggccatgcctccgtctagccgctcgcgtcagagccgccgccgacgctcttgctgacgctgatattgagtgcggcagcgatggaatacaggcgctccgcgctcgccgtcctttggctaacgacggccttcttcaactcgcgttcccacgcctcttgccacggccgtcgactgtcgtcggtgagggtgaggccggcggcacgcagcgcctgtgccatgtcgacaataccaggcagccgccggactgccatgttgtccaaggcttcgtccctgagcgcgacgagactgactgtagcgaggctggggaacctctttggcttgagcgagcagaggcgagcgatttcttcgacgcagcgttgggttgggtccgaggcgtcatagccagcggccgggagccacagctggccgaaagtcaggtgcttgagggaagcgtgcggcctggagagcattggcgaaggagtgtctgctagaaccgcaggatgtgaagcttggggtgccggtcgagcaggttggagtcaaacttgaccaagggaccgtcatactcgatctccagaaactcgagcttggtgaagcgcgcgacgcctgccgacacgtcggcgtggggttggtccgaggcgtagaagatgtcgagcgccttgaggtcgaggttgacgtcctgcagctgaggaggcgcgtgccagagtccaagcgaaggtcgagggagtggaaggaaggggtcccaaagtccaaccggagtgagagaggtggcggttcaacggcacggccgttgacagacacgacgtcgaggcttgcatccacatcgtggagagttggccgcgcatctcggactaacggagtgagaccggggagtgccgccaacagaggctgctgacactggtgaggttcggcagtaggtgcagacgccgcaagacgcggtcggcctcgtctgaaagctcagcggatgcttcatccttctgatcaaattccagccattcgacgtgacggccgaaatgcaggttgtcgtcgagcttggcctagcgcttctgagtgcgaaggtcaacgtcggagaaggcgtgaacctgggcgtcggcctaaaaaagatgagccaggggcgtcaggttgcgccgacgagggctggcagggtggtcggccgaagatgagcctgtgggcgacgcacccgccacgcttgcgacacgaggcaaaggttgagtatcacggcatggaagtctgggttcaagccacggacggcctcgccatcgtcagtgaggaggagatcgtcgagagcgtgatcgaggaccacgagctgcagctcgagcggcagcttgggcgccagctggcggtgctggagcggccgagtatttgaacgaaaggtcagttgagctgaccagccgccgtcgagcgagctgaactctagacgtacgatgcgaagcgagcgacgcatgaggtgtagaaggggagggtctgggtgagggttgagggcagagctgcagctcaccggcttgcccctttcttgccgggcgtcgacgtcgccggcctgcgcgtcgctcgagccgacctttccactgccgccgccgggtttcgagctgagctcgtcctcttctgtagcatgccccgataccatgaccccagtacaagaaaagtcccctcgcgttcgcagaagcttgcgttctgcgaagatcatgcacgtcatcaggattgtacatgtcgtcaaggcgggccgcctactggaagcaaaagttcaggtttgtcggcggcggaggtgcgatgagctgatcgggtatcgcgacgccctcgccctggaggtcgagcagccggagctgcccggtgcgagtccgtcacaaagcgagtcagcattgaggagggaagcacgacagagtccacacgggcgcgcacctttagaccaatcgttgtcagttgttcaatgagctccttcgtctcggccgtcgcgacgatccgggctggctcgttccgaagcgcgctgaggccgtcgagccactcggacagctgcatcctgtcgagggcgacgaggctagagggcgcatgtcgtcagaaccgagcgcagtcaggtcgtttcagcggacaggatggcggacgcactcgaggagacttgtcccgccgctcgagaggagcgagaagctcagctcgctgggttcgagccgccggccgccattcacgttctggcttgtgcgcagcgtgttgccggaactctcagcccgtgtgagtgctggtggcgggtcgaccgtggcgtagctcgtcctggtggcgatctcagcgatggagactaggtcgactgccgaaagcgatgacaacgagagcgcgtcagtcaaagacggcatgcgagcgacgttgacgcatagcctcgtaccgcgctcgttgagctcctcgaccgtcggccgggtcgacagcttgtgctgcgtctccatgaaggccaggtgcttgcgattcggcgcgagtcggacgaacgtccagccgcggggcacattgcgctgcgcacccacgcccgtgacgagcgtaccgtgcttgaaccaggcgccttccagaaggcgatgaatccgttgaagacgaacaaaggtgcggcactcgtcgccgatcgccgcgcgcaggttgctgaagggggaagcagacgggtcaatgcaatttcctcaacatcgcaaaggccgctcacaagacgcaccggatcgtaggcttctggtccacgtcctcgctcacctcggcctccttgatcattcgctccttgacgtccctgtactcgcttcgaagcagaccatcctcgaccgcttcccttgcttttgtgagcccgcccttgacgaggctcgtctcgtcgcgcaggacttcgccgagttggctccggacgatggcgccgacccgatgaaagtcgtttgccgagccagcgagggccgaaacgtcggcccacatgcgcaagaagaagcgcaggccaagcacgtgtacccacttgaacgacagcaggagcggcgcgagcgtcgtcgccgtcgagtggtccgaggcgtcccagtgctcgagaagcgcctcgacgacgtcactggatgctttgccaattggacaccggtgagactcgggccgagacagctgttcaagaaccagccgcgcaaaaactgcccggtcgtcgcctgttgcgaaggcgtgctgcgagaggaaaatggccggcatggtcgtcagcacaaagggcagtacagagggagccgacccaactcaccagacactccagccccagctgacctgtcctccagatgaccaggcccctctcctgccgctcgagcccgagcgggcccgcccagccatcctctgcatcgacgaggccgggttcgcgcgcttcaagtccagtcgcctcccacacctcgcgcagcatcgtccgtcgccgagcgtcgcgggatatctcgacgctggcgcggtgctggaagaacagcgcacgcaggaagttgctctggaagtcgagtagcgggcccgtgagcccggcgtcatggggcgggaccatgagcgtctggaccgtctgccgaacgtcgagggcgtcgaggtcacgcaggcactcggccttctgctcgcccgtcgtcgcggcgtcgaggatcgcatcgatgagcatcaggctcgaaaggacctcgcctccctcctgcgaccggagccggccgacgacgcgcgcgaggaaatcagcttgctcgcggatcgagtggtacacgagctcaaagccagcgccagggatgagcgcacggaggatcgcagccgagggccgtgagatattaatgggcggtgaggccgaggcgaggatggcgatgatctgagagagcggcgcctgttggttagtagccgggcgcggaggggcggccgcaagcggacgatactcacccggcggacgagacttgcctcaaaggcactgccagaggccacatcactctgctccatcaggacgtggacggcaccgagcgcgtacgcgagcgagttgccctcgagcgcgtcgatcacaagcacgagctcgcgcagtccgccgagggcgagaaactcggccgtgaacgccggctctcgcaggtactttgacagcgagaagagcgtgagcttgagcgccgacggcgtcgtcgccggcgatgagattgaggcgatggccgtcgctgcaaggatcgctggcgagggggcgagcctgagggtggattcggcacggtcagcgaacagcgcgagttggctcgttcgcttccggccaaaggttgctcgctgctgccagccaggccttcccaagccgtcaagcgacacgctccgacgcacctgatgggcactttgcgttcgaccatgtcgcgcagattgtcgtcggtgacgaggacgtcgccctcttgctcgacgctgcgcagggaccacatcagcggcgggtcggcaatggcgaagctcatgcagagctgccgaacgacatcagtaaccgctgtagcaggaggaaggatggcaggacgtcagctctcgctattcattccttcttcagggcgactcgatgggcgcacgcagggtcgcatcgatccgggcccggatcgtctgagccgcgtacgagatggtgttgctcggctggatcgcctgcgacttgggccgccagacgggcgaggccgagccgaacggctctgtcggagaggacgtgctgcctccagtctcggtcgaggatgccatgctgcgagcgtgtcaagagcgagcaagaatggggtcgacgtcgacaggctcggctggagggtcgactgctcggtcggagccgtcgccgggccgcctccgacagtcgcctctgccgccatgccgcactcgcatcactcgcgtacgacaatccctctctagcgcgctcgagctgtactagagctgacggtctgacctgcctccagactctggccagttctgccgacatgccaagggttcgcttgacgaggtcctcgaggcggccgtcgcccagcgcttcgaggtctttggcctctcggagcacgccccgaggtccgtctgcagcagcatcccattctgactttctggagtcaggccaagctgacagagatcgctggcgggatgtcctcttaggtatcgcacgcaggatctctacccggaagaggtgcggacaagttgtcgtccatcctcagtgtgactggcctgatcccgccctactcctcgctccgcagtcggacctgacgccggccgacctcgagtcgacgttcaccacttacctcgatacggctcacgccttgcgcgctcgctacgccgaccagctttcgatacccatcggcctcgaaaccgacttaatctcggcggcggatccggcagggctcgacgctctcttgaggcgcgagtggtcgcgggtcgactacctcgtcggcagtctgcaccacgtcaacgagatcccgatcgactttgatcggccgacgtttgatcaggcgctcgcctcgttcctcccggcaggtagcgcgacgccggcaaccgaggccgaggcgacggcggcgatggcggcgctcctgcatgcgtactttgacaaccagctcgccctgctcgagcgcaaccggcctgaggtcgtcggccactttgacctcgtccggctttggtcgccggcgctccgcttcagggactatgacggcgtctgggtcaaggttcggcgcaacgtcgagtatgcgatcggctacggcgcgctctttgagctgaacgcggccgccttcaggaagggctgggacgaggcctaccctgcgctggacgttctcgaggtcggtcgttgacctcaacatgacctgcgggcctgcagaaactgaatgcccgttgcccctctctcagttgattctcgagcttgacggccggctctgcctctcggatgactcgcacggccccgccgccgttgggctcaactatggccgcctgcgcgcctacctgctcgagcgcaacgtccgcgccatctggttcctcgagctcgacctcgcgcatgagcccgtcgagccggcagcggacgtgccgctcggtcaatggcggagcgggcgggtgaccgctcggctcgcggcagacggatggttggagcggaaagagttctgggggagcagaacgtgaatacaacgagactagtttccgaaagaagagaggcagcaggaagcgcgagggaaggggggggggcatgatctaggggatcgagggggccgagtacggtcgaggaggggacgatggggaggagcttggagaaggagctgctgcgcgagttgagggcggccggacaagagacggccgctgaagggagcgagatggacgaggaggaggacgagggtagcgtcaaggaggatgaggacgacggctacatcgagacattcatcacgacctcgcggcgacgggtgcgtcttgcctccctgcctcttcacgcccgatcgaaccacgatgactgacgacgactgacgacgacctcctctcgccctgcccgcccgaccagattcgcggccagcgcactacctccgcgcacaaagtgacggtcctcgagcacgagctccgcgagttcgaggacgtcgcgacgcaagtcgacggacctccaaagccgacgacggtcgagctctccatccagacggacgagtcggcgcttgctggcctgccggcgtacagcccgcgcgagcaggacgacaacgacgacgacgacgctgagatggccgaggagctcgcccaccggcgtcgggaaggtttgccgacgagcctccaccggaagagtcggagcgcgccgggcgcgagcaacggggcaggcgctatccagtcgctctactcctcgctccagcaggcggcccgtagcagtgcgggcaaggacaatcggctccgcgctggcgaggagcagggtgcaggcggcggcgtcgtcgtctcgtttgtcggcctgctcggctcgcacggggcaatactgactgcgatcggcatagccctcttcttcggtgcatcgcgtcgctcttcacctgcagccgcccgccagtcctgactcaatgcgacatcgctgacctcttgcccgtccctcagccggcctcaacctcggcacgtcctctccggccacccctagcctctttccaaccgacggcaccgcctgggagaagtacaacgactttgctcgcagtcagggcgccggcgtcggcttcgtcggtcaggcttcaggcttcagctcggcgagctgggtccgacaggtgctcggcctcggtgccggagctgctggactggttggccgggtgccgacctaagcctgcttgacccccccccccccaatcatctctttagcctcggaacgtctttctttgacgacaaccctactctgtcacgccctcgtgcccccttaatgaccccttccgacctgcttaacgaccgaccttctcccgctaccctccttgccctgtttatttcccccttgctcttttgcccttccgatcaataccctttctgcctgatcgtcgcgcgacgagatcttcatgtgtagggggcggtagggtcgtaaaagcgggacgaggggggaataggtttggaaagtgtggacgagagttgaggggggaatcgaacaaaaggcggggtgtgggtgggggtcgggtgcagcagaggatcaaaggcggcagatgctgggtgcgagaacagaggaataagaagttgggagcagggtcgttgcagtgggagtcttcgtgtcttgaaaatcgatcggcagcagggaggaaatgggcgtctgctccagcgacgtggcagctcagctcgcgagccggacctcgaccaccttctcgtcgatcgagaagacgatcttgctccgggcgttgcgcggcggtggcggcggtggcaggcgcatttgctgctgctgcggctggccgtacggctggggcggcatcccatgaggcggaggcgggcgcatcatgcccccacgctgagccatgcctggcggcggtgccggatggccatagccgttctgctgctgtggcggcaacggtggctgctggccgtaaggcgggtagtagcctccgtgttgctgctgaggcggtggcggcggccgaaaggccatccgctgctgctgctggacctgctgctgatgaagctgggcggccgagtgggccgtcgacggcggcgtatcggcaaagaggagccggatgttggagccctggatgacctgggtaaagacgccggtgttgacgttccaaatctcgacaaagttggggtcaaacgccatgacccaggggtagtggagggctgcgggatgtaagagcggcgtcagagagtgcaaatcaaaggtggcaaacaacaacaggcagggcgcaccaaagttggtcggtaggccctcccaggtgagcttccagcggacgtccttccggttgcgaggaccgccgacccgccagccgttcttgtcgacgtagaaggcaaactctggggcggatgaagaagaggaaaggtcagcgagcaattggtctgacaagcgactgcgggacggaccgtcgtagcagagcaaaaagtcgccctcaacccggtagatggcgatcggccggaccggccgctggttgtcgcgcttgtggacgaggtcgaggttcgggtcggccgggtcgagcaggccttgggtgtcaagcgtctcgagatcgacaatctcaaagccctttgtgcagccgacgcagagcttcgtcttgagaaagtggatcgagctcgactcggtcggaatgtagaactctttgaagacgcggagcgtctcgttccggttcggcttaagcttcgagaaggcggcgccgccctgctgcttcttgctcgcgggcgcctcgaccggatccatcgtcttgatcgtcgtcgagagcggcgacgacttgacgatgcagacgagctgacggccgacgcacaggccggccttaaagaaggttgtgtgcgacgagatgcgcttgccgcgcttgagcgccgccgtcgggtcctgcaggctgagcgattcgagtgggaacgtctggaccgagcgctcggcgaggacgataagcagcgggaacgggtgctcgagcacctcgacctgagtgacgtcgaggagcgagacaacgagcgccggcttcttgtctggctcggccaggttggaaaagtaaacgccgtcgtcggtaccgtagatgatcttgtcgccgcccactgcgaaggtggatgccgtacaaggtcagcgggtcggcacgggagcagacagcacagagacgagagggaacgcactgtacgggacggcgcagttgaccttgaacgggccgactatcgagggctcgagcgggtgcagctcgatccggcggttgcgctcgcgcacgagctgctgctgcttgtcgatcgtctcgagccactttttgcgctggacgtgcgactcgtgccagagcgtgagcgtgtagcctcgccggccgaggtagtggaacgtgatcgagtagccgtgcttgccctccttctcgggcttggcgtttggcgcagccgtcgagcccgacttgcccgtcgccgtccggttgaggagcgcttttggcctgatgccgtacttggtcatgttgtactgctcgtctggtgtcaccatcgtcagcagctcgagcggaatcggccgcttgtagagccggagctccgtctcggtcttgctgacggccttgtagcgggcgaggacgaggacgttgtcgagcaggtagacctcgaggtcggcactctcgctctgcgtcccgccgcggcgcttgagctggcccttgtggacgagctcgcgggcctcgtcgtcgaggcggagctcctgtggcgggatgggtcaggcaagcagcgggtgagcaaggggcgtccatcgagctcctgggagggtcgacgcacctgactctcggcccgccggagctgcgagtcgagctggacgaggtccatccggctctgcgtcttgccggcggccgtgttgaccttgtcgagccagccgttgaggagctcaatcacctgggggatccagacgaggtccggattgccctcgggcgtcaccttgaggatcgccttcagcaggagcgggtaccggccgagccgcgtcgtcggcttggtgaggaagccgttgagctcgatcttgcgcgactcgggcttgcgctcgacctcgtcgacaaagcgaacgaagtctggattgtcaagcttttccttctcaaactcgtgcttgccataggcttggtggccgccgtagtcgacgaacggctggaagagcgggacgcggtcgagaaagatgtcgccaacggcctcgacgaccggttgcgagcgctggcgcttcgtcagctgctcggcgagcgacgagttgttggcgaggatcgtcgagacgttccaaaagacttgggtcgcaaacgcctcgcgccgctcgggtggctggatgacgtcgttcgctcgaagcggcttgacccagaactgaacgagaaaggagcggcggtcagccttcagtatccgctggcccacgatgagagagggtagggagaaacgcacgtcgcggaggtactccatgtccttgacaaagtcgcgctcggtgaagatgagctcgttgatggcctcctggcgcttgcgctcctcgtcgccgacgctgtcgagaatggcctggctgacgccattcgcccagagacccggcccaccatcggcctgctcctcgtcgtcgtcctttagcgaggcggccgatgcaaccttgcgcaggccgggctggggcttcatgttcaacttcttggcctgctcgatccggagcgggcacgagatcgagtagcagagcgaggtggccgagcacgtcggcgagtagcaggccgagagtagcgtaaagacgcctgaagggaggtcgtcgctgtcttgctgcgaggcggcggcggcggcgagctgctgagccgtcgacaacgacgggtggtcgatcgacccaggcgaggtcggcagtgacaacgacggctcgtgatgagccgtcgtcggcagcgacgagatggacgaccgctcgccggccgaggtgaagatggacggggagcgtgagggcgccgataaggacgaagctgcgagcgagtctgcgatcgactgcgtgccgtcctcgggctgaagcccgtcgggcgtgcctccaacgacagggaccgacccgccaagagcagccgcaaacggcgcgttggggacgatgaccttgcccttgaactggtagagctcgtgcgtgctgtcgcgcagccggtgatcatacgtgacgtcgtggaagaacttctggaagtcgagcgcgcggccgagcaagagggcaagattccggttgtcggtgtcgagcagggcgcagaggagatcgaccgcctcgcgtccgtcaaacgcctccttgtatgcgaggccatccttgacgcgctcggtcaacgtgaggcctgaccggaaggcgtcggcgacgcgcgagaggagggcagggtaaatccggaccggtcggcgggcgggtcggatcatcgagcccgagccaccgccgctgccgcctgaggtccccgtcgtccgcgtcgagccgctaggcgacgggaagttgtacgatgtcggcgtcggaaagtttggtccaccgccgcccgagcccgagccaccgacgctgcgaatcgagcccgagcgaagcgaggcgacgcctccgtcgcgcccagccgagtgctgcgacgagaaggatgtcgagcggttagcatagccgtgcccgccagcgtggcctccgtggccgttgtggaaggacggcagcgagcgggacgagtcgaccgagtcgcggcctgtcgagccgtgcgaggtcggatgcggccggccgccgcccatcaagggcgattcgacgaggtagtgaccagacgaaggcgaggcaaggcttctcgagtcggaagggagatggtaggacgacgaggtgtcgatccgggagagggctgcgaagcggggacggaggtcagcagtcgatcaccaaacgatgcgctcgtctgactcacgagcaaagccaccccctccagggccgctactccgagccgagctctcgctaggcgtccgcgtgtgcccgctccggacgctcgcggcgctcgagtacctgcttccgatgctcggcgcgccgccgcccgctcccggacccgagccagaatagtaaccgtcgaccgagtagacggacgaagcggcgctttggacccgacctcgggccggaggagcagatgcggtgccgccggccgccgctgctgctgctgctcccgcggcgaggtagccaagctccgagtcgtccatcgttcccggccgaggcgtgaccatccctccgacaatgacagccccggcgcggtcacgtccgtcgtcaccgttagcgtctccgtcctcgcgcgagcctcgccggctcgtcggcgccgacgccgcgtcccagttgaagccgtcctcgccgaagctgtcgaatgcagggagctgaagggcggctggcggagtgccgccgtccgatggaccgcctcgggcatggattgactgagcgcgggcggaggcgaacgagctcgagggccctgtcggttgatagggccgattcgtcggcgggacgggcgagtacgtcggcggaggtggcggcgactccgactctgcgactggcggtcgagggcgaggtgatgagccagacgaggatccgccaccgccgctggggagaccgatctgagcctgatactcctgcgctggcgtcagcccactaggcccagggtggccagccgagagcgagccgtttcgcccgtagtagccggcgccgctgccggccatctgagcagctgggttcggcatcgggtacgcatgcgacggctcggtccattccgagcttggcccaccgtgggtcgagctcgcgtagctccgcatcgagccttgtgtcggccggcgctcgacttgcgcaccgctggcggggccgagtgagcccgtcgtcgaaggcgcatggagtgagtaggccgacgacgcggccggatgggaggcctgctgtggatgaagttggtaggggccctgctgctgctgttggagagggttgatggacgacgtccgtcgtgatcgggggtcggccggagggaggtaaagcgatgaggaagacggcggcggcggggcctggccgtaagggccgggctgcgcggctgggtagccgtgtggcggaggcggacgaggtccgtaaggggccggtgccggctgcgaggagacgaacaggagcaagatcgcagaggagaggtgcgagccaggtcgacgaccggtgacaagcgagcacgtgaggcggccatgcgggtggagatgaacaggtcagcgacactcctcaagttagaccgaggaagcaaagagttctagcagattggctgagacgaaagtggggaaagggagaaggagggggcgatgatgatggctcgggtcgagctcaatcttgcggcgtcgagcgaaagagggagcgagcgagctgctctcgagccggcgaggcagagccctaccactcgactcgatgccggcccatccgactcctggcagcgtcggatcagagcgcgcggcggatcaaagcaggccgcgaaaggttgggaaatatggcgagaaaagaaagaagccgaggacgcaccgcgtacgctccgccgtaaggcccgccggcgtacggagctggccctccggccgacggatgggcgcccggcggcaggccgacgcctgcggtctgcgcaaactggtcgtatctgccctcttgtctcagaggcgccggcggatagcccggcccaggcggcggcggcggcggcggcgagggagtgtaggcgccgccgtagctaccgccgtaagccggctgctgctgctgctgctgctgctgctgctgctggcccggcgcgttgacgtggtgcgtgttgcgccggccaaagatctgcgagaaggcttcatctctcgttggcggcggcggcgctggctggcgggcgccttgtgggccaccggccgaggaggacagcgcgccgtgcttctggcgcgggccggacgggcgatgggccatgaacctgttgctggacctcctctgccggcgagcggaggggcgggcgggcgggcgggcgagcggcgagcgacgacggaggctcgcgagcggtctatctgcctctagaagtgggcgcggacgtggaccaggcgacgaggagggcgcgccagtgacgaagcgtgcttccaagacagcgctgcgagagaagaaggggtgtgaggaggggagagagaagcaagggcaagacgaggatcgcctgggccgagcgagggcgaagacagaggcgcgccgcgccgcgcacgcgcccaggcgatgcgccggtcagagggtcgatgcgccagccgcagggtcgctcgacccctcgagctcgtcctcctcggcctcccccctctgtccctggctcctccttacagcacctcgtactcgcagccatgcctcctccgccgccttcgccagaggcagtccagctcgcgctcctccagaccctcgacgctgcatccgatggcaggctcaccgactcgcggacgctggtcgtcgacggccggcagatgaccgaggcggccgaccagatcctcgtcaaggccgccgtcgactcgctcctccggcgtgaggtacgtcgcttcgttatccgacgagtggctgtcgatgggacgcttggctatgggcatagagctgcgagggcttctgcgacaagcaggtcggccataggcagctcgctcctgaagctggtcctctgactccgcctggccgcagctgctcgtcgtctgtcgtagccttgcttccacgtagcgctgcctaacgatccttcctagcgataaagtgaatgcgcctggctgacaatggacctctccttactcttgccgctcgctcgcgtcacctcgatactcctccgtccttcgctgttcccgccggccgcccgcagatgatcacttacacccagcttgagtcttttgtctcgtccctgacgcctgacggcgcctcggcggccgagcacggctcgcccgaggcccgcgtctgggctgcgctcaaggacggtggaaaggacgccaaggagctgcaggtcagtcttgttgctctcagctggccgtcctcccgcgcagcgctggaaggtcgcagcgtgaaggtcgggcgcgtgcctctcggaggcgctggcccacagcctcagcgtttgctgcgccctgcccactcctataaagcgagctgtccggatcgaaaggctagcggcgaccgagggtggacgagagctcttccgtggaacgcaaggacttgcccgggctgacctccaagctcgcccgcgctttgcaggccctcctcggcgagacggccaagctcggccaggcaacggcgatgaagaagaagtggatcggtcgcgacggaccttcgttcgtccaggccgcgccggccatcaccgacgagacggccgaggcgctccggcaggtcgccgccggctcagaggtcgacgagaaggtccttgccgacctcaagaagcgcaagttcattgcccagaaaaagtttctctacttttcggcggccaagggcgacaagtttgcgacgacagtcgtcaagcaggcaaccgacctgacggccgacatgatgacgtccggcaactggaaggacgcctcattcaaggcctacaactttgccgcggccggcacgccgaccgagggcggctcgcttcacccgctccttaaggtccgcgaggagttccgcaacatcttcttcgaaatgggcttcagcgagatgccgaccgaccagtttgtcgagtcggccttctggaactttgacgcgttattcgtcccgcagcagcacccggcgcgcgagatgcaggacacgttctacatccgcgagccgagcgggtccaacccgccgccggcagactactatgcgcgcgtcaaggacgtccacgagaagggcggctttggctcgatcggctaccgggcacccttctcggacgcagaatcggctcggctcctcctccggacgcatacgacggccgtctcgtcggcgatgctctaccagattgccaaccagccgggaggcttcaagccctgcaagatgttttcgatcgaccgcgtcttccggaacgagacgaccgacgcgacccatctcgcagagttccaccaggtcgagggtgtcgtcgccgattatggcatcacgctcggcgacctgatcggtaagtttgggcgtcgcgcgctctctctctgcactgcattcttttcggacgggctgacgtctcctcctatgcgacacccctgccctccaggtttcatggaggagttcttcaagaagatgggcatcgagaacctgcgtttcaagccggcttacaacgtgcgtcgcccgtggaggtcctcgctgcagccagtctgcgccttgacactcccgcactctcgtctgcccgcagccctacaccgagccctcgctcgaaatcttccagtaccacgagcagctcgacaagacgattgagattggcaacagcggcatgttccggcccgagatgctcgagccgatgggcattccgaagggcgtccgtgtcctcggctggggtctctcgctcgagcggccgacgatggtcaagtgcgtgcccccccccccccgctctcgcctggctgccaagaccctttcggcgtgctgacccttctgctcgctccacacaggtacaagatcaaggacatccggacgctcgtcggtcacaaggttgacgtcgagggcgtcaagaaggcggccgccgtccggctcgacaagggcgtcgtctctgcgtagactgcaaggcaaggaaggaaaattcgaatgacatagacgttggacgatcgggctgggtgcagggagcgcagcattacgactgctgggtcgccagtgacgagctcacgaagtcccgttggaggcctactcacggcttcggtcggctgggtggcagaaaacggcagggctgcaggcgatgttgagtgcgcaggggcgccgccagcacgtccggatggccatcatgctcgttgcggggcgagcgcgctagagcgctccgatgcctggacgatccggagaagccatgcctgaggtcggcgtcgaggccacaacggcaggcgacggcgaggcggagagcggagaccaaatggtcgactcgactctaccgtaccgtctcggcctcgtcgtcggcttttggctctgcgcgccatatctggccatcttgagtactctcgagttcgagcgcacgaacgagctggccgacggggccgccgaggtcgagcggctcccacgcgctggcctcgccaaactcggccccgaatcggtcggcgaggagggccgtcgccttggtgtaggcggtctccgagttgccgggcgaggagacagcagggatggcctgcttctctgcagcctgcatagcggtggccgacgatgaggcggcttcctcggggggtgtcggctgggggaagtcgctgagcgcggtcgctcggatcgagggcaggccgcaggcggtgatctgggcgaaccatcggagaggctcggccgtcaagttgagcgcgaagccgtgcgtcgtcagccgttgacggatgtgaatccctatcgaggcgatctatagccgggggcatatcgtcagccgtcgcagcccttgaatgagcgcggaggaagggctgaccttcgtgtcgaccgtcggaaagacgccaacatgatcgtccggatgaggtgcaagcacaggccgaccgatctgcgcctcgacgaaacgcttgagcacgcgctggaccttgtcaacgtagcactttgtgctcagctgcagaggaggtcggcaggcggacggcgaagcgcgcagcgtcagtgccatcacttctctccagcccccttgccacatgccaggtctgacacagaccttcatccggccaagatcagcgacaaggtagccgacgacctgacccggaccatggtaggtcgcttggccgccccggcgagtgaccgcccagtcggcgccagctcgggcgagccggcttgcctcgcgctcaacccggtcgagcgaagcttgggtcgagtcgcgccggcccgaggtgaacgtcggccgatgctctagcgcgatcagagagagcgacctgatcagcgctaatagaaacggaagctcgtgagctgggacggaccgagcaggaggaggacgtcacgccgggcgagctcgccctcgggctcgctcttgcgagcggccgaccggagcgcaaagacggcgtcctgcagcttcagcgtctgggcgtacggcagcggccgacggaagacgtggacagccagcggcaacggcgaggggatcccgggcggaggcatacgatctgggtcggagagggcgaagatggttgaagggaaacatgctgacagcgattgggctgacctgtcaagcgcgacgcgcccgcatgagtacgcctaccgacagctccactcgtcctccgcgcactttccgtatccaagggaatctcgtgggatgagtgaagaattgatcatcgtctaaagtcccccgtcgccctcgttcctcaggtcggcattttcaggtcggcatgaacctggctgcgcgcttccagacctcggccggcgaccggctgaagagggccaggccgccgatgacagctgcgaccgtgacaagactgccgagcagaatgaagtagagcgcccaaactgcaaagacgcgacaggggttgcagggtcagctgcttatggtctgctctcaagttgagactcgccgacgcaacggtaccgggggccgccgatgagatcctcaaactgcggcagagtgggctggggttcagttgttgaggagtacaggagagaaagtgagaacttcggacctgggtggcatcgctcgattcggtcttgccgaaaaagtgctcatcgcagacgtcgttgacgacgaacgactcgatcagcgccccggtgaagaggacgaagaatcgcagggcctcgccgtgagcgacaaaccagaggccgatcatgaggcccacctgagaggcgcgaggcatgcgcctgtcagctgccctgctggatatcctgcacctgcgcacagcgggcgaggtgacgcaccgtgcagacaatggatgcaatcggcttccagtcgctgatgagcgcgagcggagcgaggaaggccaaggcaagaaagatggaagccagcttggatgccggaatgtcgaacgcgcagagctgaagcgggcgtagggaggcgtcagcccaagcgagacgaacagacgaagggccaagggggccaaagcgtacaatcaggacgccgccaataacttggccgcccatgtaaccagcgacgagcgtcatgatcgcctttactgatttgacagcctgggtggcagtttctggcggaagccctctcgcgaacggatcaggctcggcccggaggaggtttgaaaactgcgtccggccgccaatgttgggatcctgcgatgtgcaagaagggggttcaaaattttgcaagacgtaagtcaggggagttgcatgagtcgatcaaagaaggagacgaacgatgctcatcctgagagtgtatcaattaagaatgaacggcagggatgtttcggagtgacggagagggggctgtcagcgacaggacgagtaaagatgcttatgaggatcgcaccaagtgatccgcccaccgcacgcgagaccgacgacagcgtgcgaggcctcatggataccagtgacgagcaacttgtgcgcagcgatgatatctctacgagccggtagcggtacgagtcaatgacgtgaagcgagcttgtcttggcgcgagagccggcggcacgaaccgtgtgaagggcaggtgccataggacgaagccaaggacgctgagaggcaatggtaaaggaggacaattcagtgaaggttgaagcatgatatgggagctcgagcatcggccttagggcacggaggctcgtagacgcaccccttttggcaaggataaggagctcacaagcaaatcagaagggcaacgatcgtccgcacatcacgctcgttgcaagggatgccagaggatcttgacgtcgcacgcgaggcaagtactgcgcccctcgccaggatgcttgatgtgagtggagcctcgagctcagctgcagaggaagccgcagtcgacgagccggagacgaggtcgagcaggacggctgcagctcggctgagcacgggcggagctggattcggcacgaggtggctgctgatcgagagagcggcgagtgttggcatcctgacagtcaggagaagcttctggagccagcccgggtgttggttggcgggcggcgagagtccggcgagctcctgtcgagcagagcggggagcgagctgtcgacaggaggtccgggcctgcttgcgtcgcggacccctacgcttcctcagaaacccagcgcagtgcggtgcaatcctcttcctatccaaccatggctcagcctctttctagccccctggccgttgcctgggtcgccattcgaaagaggtcaagttgctgccggggactgctgcgcggcccgcgaaaaggttagggttagcgcgtcgccttcagcccggccagcaagctcgcccccatctgccgacgtcgacttgcaccccgaacgctcttcctataacctctcttctctgcagctcgctcggcggctggactcctcgctttctcaagcatgttggcctcggagctcaagaccatccgccggcttggcgtccgcggcgtgcgttcctcctccctctcgtccttccgctcgctcttcgtcaccttccggctccgctcctcgcatcagcgcacagacatgcgccgtatggctggcgagcgagcacggagctgctgtcggatggcgagcagagccggctgtcggtctcagaggcaacattgaagctgggcttcatctcgcctcgtcgtctgctgctgacctgccctggtcactcggggaccgtcctccctgttgctccagtgcctccaatcgatcctcaacctgctcgtcatgctctcgtctggttcgtcgttcttccagctctcgaccttggcttcaccggggaaaccgtccttccttgacatcggtcgtaaggttacctccgcctccggtgcctcgactgacgcgtactctcgcgcctctgtctctctcctcgctgggcttgcatcgaaccgcaggcctcatgatgtggaagacactcgcgctcgcgaccaactcggaatcacccgtcgtcgttgtcctctcgtgagtagacgtttttcgccgatagcaggtcctgtcagaagcgcgcaggcggcggcagcgccgagtcgttcgggaacgccagcgcagaccttaccggtcgatatgttgccgacagcagcgccgcttggactgacgatcgcttgcatcccttctcccacgcccgctgcagcggctcgatggagcccgccttctaccgcggcgacattctgttcctgacgaatccggcggcggagcgcttcgccgtcggcgacatcaccgtctacaagattcctggcgccgacatccccattgtccaccgcgtcatcgagacgcacgacctgccgtctgtcctcccgcgtcttctgacgacgagtcggcacgccagctgacgcccctgcctcccacgtcactccagcccgtccgcaagcgccctccccgaccagctcctcctcaccaagggcgacaacaactcaggagacgacgtcgacctctaccgcggcgagaagtggctccggcggtccaacgtcgtgggtaaggtcagggggtgagtctcttcatttctgccggcgcaggcagcatctcgctcgagagatcatagttgctcctcaattcggccagttgaccttcctctccctgctatcagctttctgccttacgtcgggtacgcgacaattggtcagtcgctcttctaggacgctcggacgagatcggcgctggggctgggatcacatttgcccccgaccgagactaaccgttcacacccgctctttcttctcttttggtctttgtgcctgcggccggcgaaaactctagcgagtcagtgccttcagctcacagcccgatctcagaacctctgggctccttgtatgcactcaaatagcaattgacgaccgttctggctaaacccgaccttcgctcgaccagtggtgcgcaccattctgctctcgggctcactcccccattcacacgccgagagctgactcgtgtcgacctctgtcctttcctgcagaacgactttccgcagctcaagtacgcccttctcggcgccgtcggtctcgcggccgtcttctcaggcgagtcgtagaggtctcctgccgaacctagggcttttctcagacgatctcgatgtcgagtctgctagacattgcgggctcacgggtaaagcagtaaagggctcttgacattaaaggaggagcgatgatgcaggtacggcatgcaatgcggtgaatggggataattagagggcttgagccgtaagataggctgatgagacggacgttgcctgctccgcgagacgatagagggcggtgggtttcgtgaggccgaggacgagctcgatttgtcgcggcgaccgcctcaccgccgccacagctcctggatgtacttgcgcggaatgaactcttgcgggctgtgagtcgccgaaagggaaggcaggccgggttatcagcttcgttcgatcgaccgctcgccaggcaggaaaggcacgcactttgcccggtcgtcgggccggggcgggatcgcctcccagatggcgttgatgtaggcgttgccggtggcagcggcaaccgcaatgtcgctctcccgccagttgtcgagctcgacgctccggaccttcgacacgtgtgagcccaagctccgatggacgcccgagcactcgatgcacatgaagccgacaactggcgcctcgttgaggccaatcgtggcccatcgagggttcggccgctcgcagtcgaggcaccgagcgttggacaaccgggcggcgattgagcggatcgtcaggaccggcatcggcggcggcgtgtggtgaggatgctcgctcccttcgctgacggtccgtcggtcggccgagctgctaccaccaccgccgccgaaaaaaccgcctgacgaggccgactggcccgcaacagggctgagggtgaggtccgggctcgacgccgctgcgagatcggtcacgaagcggtcgatgtggagcgcaatgtcgtcggtcagaaggctcggcgaacgcgacgggccggcagacgaccggtcgctcccggacgactcaaacgagagtcgcgagggtgcctcgaacggaggaagcaggtggccatttacaagcggctgggtgggcgtgcccatcggcgaggctgagataaagttgaggcggggtccgtcggcggctggcgcagaagaagtcggcatgaccgactgggaccggtggtgttgccgcttccgtccgccgctcgacgagccgggtgcgctgaccggcgcacgtgggtcaaggatgctctgctgccctccaaacgtagaggccgagccgctctctgacgggctgtgttggtgcgagaggtgctttgcgcgtccgcgaagagagaccttgcgcgagaggtcattgccccagccccgcagaccagggaatgctcccccgccggcggccgaagcctcccgttcgctacccgagggcgaagggaaaccaaggccgaggccacccaacgctccgttcgggtgctgctcggacggcgagacggaaggatacggccggagaccgagatcgtcgaccgaggcgagcgacgacagcgaagggctcgagctgccgctgccccggatggaggctgtgccggtaatcgaggcctcgatggcgtttcccaaggctgcgatccagcggttcatctcgaggtcgctcgtcgcttggtagcgccgcgtcgacttgctcgtgatcacctcgaagactgcggagcggagggcgcagcggatcagtactcgcacggttcgacgatgcacaggccgagacgcaccaaagcggcgatccgacttgcgcatctcgcgtgcgctcgcaaacatgaggtcggtccggtgctcagccggctcgccaccgtccgttatcggccggtgctcgacgaggtttgaatgcttgacctcgcaccagcagtggtcccacgacccgcccttcttgctgtcaccgccgcaccagagccagccagccttcttgcgcccctcgctctccttcagcgcgagccaggtcgggtcgagatcgcggatgcccttggtcgcgctgccgccggcaggcttggccgcggacgccgacaagccccaggccgaggacgactttggcatgacctgcagcgaatgacgctcgcggcgcttctcgtctcgcgacatgctcgaccgaggcggagccgggaggacagaggatgtcggaggaaagaatgaaggcggcagcgtcgttggcgaggaggcgcctggtgaccggctgcccgtcaggttgccgaccgcggcccgcaacttggatccgagccgatcacgtttgcgctcgccgccgttaatgaccggatggccgtcggacgagagtgagagacccgccaccccgccctcgactgactcccagtcctcctccgagacggccgagccgttggtctgcaaagcactggcctccatgatgccgcgctcgtgccgcatccggtggaacggccagtcttgaacggccgagctgaggtcgttggcagcctgaagcgatgactcgaggtcgagacggagagccgggctcggcgacacgctctgctggttcagcagtagcgaaggaaaggtaagaaggttggcgtagagcgacgtgaagcgggggccgtaggttagatcgagcagatggctctgaatctggaagcgcaggatgctgccgcaagggagagtttgatgggtcagcgaggcggctctagtgcgtcaaagcacaaggcttgcacccactcggaatcgcgttgacgcttctcatacgccgcgtcgagctttggggtgtcgcggctgtttggcgcgctcaggtacttctgcgtatagtgctgaaaggacttgatctcgtcctgccagccagccggaggagtgcgtcagaggagcacgaggacagcggcatctggaacagactgacctcgaagccggcacctttcttgcccagtcgatcgcgctcggcctccttcagggcgtcaccccaggcctggagcggttccacgacgctgctctcgagactctcacgctcctcgcgcctctcccggagctgccgaccgacgacgccatcctccgtccagagccggcgaatgccaccttcatgcgggacgacgccgtcctcgagcagatcgcccaagagggccatctcgtacgacagccgacgctcggcctcggctaagctgtcgagtagacggacgacatcctcggctgcttgacgggtcgccttgacgtgtggtcggaggtcgtgtaggcgtcgattgagcgagtgcacctgcgctcgcgtctgaggggtgtcttcggctggtgagacgggcaggcggagtgcgtgctgcgtcctggttgaagacgtgtggtcggctgaactcgttgcgccgctggtcgaggccaccgagctcaacccggtcgacgtccgaattgggcgctgcggccgtctcggcgtcggcaagtcgtcgaaggccggttcgagccgtgacggtgacgcgccgggcgaggccagctcgacgacgcgtcggggtggggagcctagcgcaccgagcgcgacgcctactccagaccctaaagcaaacgcgtgcgaggccgaagagctctggcgcgagcggaacgagtcgatagaggccttgcgctgatggaacgacacctgagtcggcgacgtgttcaacgacagccgagggccgccgccagtgagagccgccaggctagcctcccggtgccttcgcgcaggggaggtcggtgccgagtcgcgtccgcccgacgagttcggcggcaagcctggatccgaaggcgaagatgatggtcagcgctgcgtctggcgaccttgtgcggtcaaaacgtcggccagcggtcgacggatccgctcccttggggcgggccgcccaggctaaggtgcgagaccgagacgtaccgagtccgacagtcatcgcgctgtctgcgctatctgtccgagcatgcaagccgagaccctgctcgtcgtcaagcccgagcgcttgattcgacaggggccgctgcaggccccaggactctcgccggctggctgcgaccgacgtcgacggcggccgaggcaggggtcggccgccgtcgccgctcgtgcccctccctccgtctgccgacatgggtcgggccgttgtcgcgcggatggatacgggccacgagaagggctagaagacaggaagggtagctcgagtaggtgcggagaggggctgaggctgagcgagattgttgtcgtccgggagcaggtctcgtcggagcgaaccggcggccgttgcggcgccgggcggcgcaggctgaaacggctgcaggcgcgaacctggcccatctagcttgactgacgcaagagcggaagcggtaaaggctctatagataaggatgggggcagacctctcggccagcatgacggtagagaggcagcagatgaagcataagtgagggtggggtgcgaagctgttgcggatggggggaagcagagtctgcctctaagagggggtggggtgcgcactcgtacacgttgtctcaatctctcttcgtcgtctcgtcctcccggcgcactcctcgaggacgccggcccagtggcagtgcccaaccgtgcctgccaatggctcggggtgacctaggcggcgacccggtctcggatgcgtcctctagagccgaagcgccagctcgtacacactgcgagaggcagggagcgcatatctgtcagcagcaggaacctcatcaagggctgacccggccgagcatacctgtacatcgccgccgcgttcgggacgacgcgcatcatgtgggccgtcaggccgctgtagagcgaccgtgcgccctcctcggcgagcacgagcttgaacgtctggaccaggctccggtacttgggcacgagcgcgccggccgggattggctgccgcagtcgcgttcggaggacctcgtgcgggtaggtcacaagtgcggcgaggagcttggcaccgccggccgcgccgaggacgccggtccactcgccaagcttgccgcccttctctgagatacccatgcgcttgaaacgctgcgagcgggaagcgcagggatagcaaagaaacgtcagcggtcgccctaggagctgcgggacccagactgatgaagcaggcgacgcacctcgtacacaacccactgaatgacgagctccgagacgccaagcatgctcgcgctcaggcccttgtagagcccgcgaatgccctcgttgcgaacgatgtaagcggtgcagttgaaggcattggtgaacggcggcttgggcagggcattagctcccgccggcggccggagcgcattcgtcggcatcgtcgtcgaagcggcgccgatggtacctgccggctggaaaggcgacacggcggagataatcttcggcgagtggatggccgatgcagcctgagtgaactggccagacgagacggcggcagggcccgtcttgagcgtgccgtcaacgagggcacctgccggtgccttgaccgaggacgcgcgagtgtgcgcgtcagccgctgccttgcggacgcccgaagacagctgtagccgtgtcttgacgacccagattgggttggtcgcgatgccggtcgcgacgccagcgttagcggccgccagcaggtggacccatggcgcctcgcgcccgttgttgaacttctcggcgatgatcagcttcatgttaccgtacgtgaagaactggatagacctggcgattggagcacaaagtgaaggagatcagctgccgctactgctgctgagaatgagagccacaagcgaaagtagcgcaccttgccggaatggcaccaaccagcgtgggtccgatacctcgccaaagcgcggtgattccctctgtccgtgcgatatccctgagagcgggtggggtagagaggcatcgatggcggtcagcaccttttgcgcatgccacgtgctcctcggcgcagcaggtcgtcgagggccatcaacctaaatcgagccggcgactgaggagacgcacctcagcagctgggccgtctcgacaaagttccacaggatgttgcgctgcttaccggcgacggccgtggcagcctgcgtcgtcccgagcgcgttctggaggccggccgggagggcaccagaggcagccactcgcggtgccgatgacgacgaggccaccgccgcagagtaagggatcgagacggccttcttggcttgcgcctcgggatgctttgagaagagcgacgattgaagccgagtctgaacgagcgtatgcatgaatcagcgctcgcccaagccaacgggggagacttcattgagtcaacgcaccttgacgacgtcaagcggcgcggtgatgaggccgccggtcatgccaccgatcctgcagagagggcgcaaaacggagagcagaccagtcgcatgtcagctcaagtcaagccgagctgctggaggccggcatcgagcggcagaggtcaacgacgccgaggtggactcacgctcccgcggccatgtggttccagctcttcttgggatcccattggaccgttcctgtcggctgcgactggacctcggccggatactctatcgacgcggagcctgccatgcgagtagaataagggtggcttgagggctggcgggtgccgtccgcagggagtcgacgggggtgagaaactgtctcttaaacacatctccgagcccacgagactagcgctcagcgaggggaagggagagggagggggacgaacgaggaactcatagaggacggcagtcatcaggagcggaccgagtgcggcgatgttgtccgagttgaaggacgggacgatgcctatgttccgttcgtcgaccgaccgaccgaccggggagaatcagcagcggccgcagtgactcactcgacgccgaccgagagcgaacgagtaagaggggaacgcactcgagaagatgaggcatgggagggcgacgtttaggcagacctgggagaagcctctacttgctggtggggggaagaagccggctttcgtgaggcttcccgacccggagagaggaagaagaggagggggatgtcagttggtcgcctgggagaagaggggccgaagaggggagggggcgtgggcgcgagggctagcaggcaggcaggcgaggcgagaccaaggcgcgtgagaagaggaggaccgcaccagaagccggcaccgacggtcaggccgatcttgagcgtcggcgcgagcgaggcccagatgatctcgccggcggtgggcatcagggacggttgggacggtcggtcggtcggtggggcgccgagggcggtgcgagaaggccgaggcggaaggcgagtccggtctggctccgagggtggagagaaggtcggtcggagagtgagcgagggcggtggagggtgaggatcgagggcgtagctagcggacgaaagggtcaaagacgacgagcaggacgacggcaggcccgggccggaaggcgagcgcagcggccgaagacgggccgaagcgacctgcgtaagccgcttacccaaccagacgtaacgcgtcgctctggcgcgcctcgcccacgcccacacgccccacgcgctgactttcctggccttccctcgcgtcgtctcgtcctgcttcctccctctctctctcgttcgctctctcgtcggtcggtgtcggtcgctcctcctttctttcggctacacaaccctttcccttttcgacccgcgctcaacttctcgacgacgcccgatcgactggccggcgcttggcctccctctctcgcgggcatctgcctccctccagccggtccttcgcccgctcagccggtcagtcgtttactcgacccggaacgcatctctattgtgttccgcgtgtgcgagcgcgtgcgagaagctagagagagaggcctgactgaggtgtattttcgcctcgcttggtcggctctccttctctcctgctcaagacagacagaccacgcgacggacgcgcctccgcctgcctgcccgccggacgagccccccccacccctcctccttgttgaattgcgccgacgatggtagctgcccctgctccctcctcgccttccaccggcagcgccgaccccagcagcagctcccggcccaaaggccttcctcaatcgacctcgctcccgtcgctctccgccgccgctgccgcctcggctacctcccctctcacccctgcagcaacggcagcagcggcgtcattgcgcggcacgccctcgtccaacagagtccgaggcgtcggcgggctgcaaagagcagcgagcatgagccccgcaagcgtcagcatggactctagggagaaggaggagatcctcgctgcggcgcgaaagaaggtgcgctttctcttcccccccccttgctctccacctgctcctactcctcttctcgcaatcgaccgctcaggctagaaggctttgacggagcgcgtaagaagcctatgctgacatctccttgcgctcgctcactcgtcaatgtccagctcaagaactaccgcaagaccaagcagtcaaagcgcctctccacctcgtcgccctcaaccaccgcctccccctccgtcggcgtcggcgtcagcggttccatctcctccctccgctccatatcttcctccacctcttccctcgcaagtctcagcgtcctctcctcctcgcctagctcgcccgtcgcggtctttggcgcgaggccggtcggagggcaccataaaaagcggtcgagtctgggtgggtcgaagggcggcttgggggcgttccggatgccccttggcgtgccgccggcggcggccggcctgaacggcgctgggggcagcggatcgtcgccggtgaggaacgcgcttggttcggcctcgagccctgcgtcgccgccgcacaggcagcagcagcacggccgtctcccctcctccggtggcccaacgtccggcaccgccgccgggaaacacggccacaagcgctccatctcaacaaagttcgtcttccccccaccgtcgtcgtcgtcgctgccgtcggcggcgggcccctcggctggcccgccgcttgcaggcaggaaggcccggcccgtgtcgatgggctaccaccacgccagcagcggcggtgggccgtcgcctcgcggcgtcgcgtttggcggtggctcgcccgctttcttccctcctcctctgtccggctcgagctcgcccgctttcgccccccaatccccaggaggaggaggaggagcagcggccaaaaaacggcactcacaccgccgttcgctctcggtctcgacaaagcacggctcgctctcgctcctcctccccccggacgtcgctgcgaaactcgccgcgtcgccctccccccactcgccttccggcttcggctcggcagcggacgagcgccgacgcgcactcgaggcgctcagcggcggaggcggccgcggagggcgaaccgacgttgccgctcctcctccctctttggctggcccaagcacggaaggacgaccgctgagcgggcttggcgtctcgggctgggatacaggtctcatgccctcgtcatcggcggcggtcggggggttggcgaatgccggcggaggcggaggcgtcgcggatctaagcgagggaagggtcgtcctgcctgactttgcgagtctgggagaggacgaaagttttgagcagcggcagcagcagcagcactgtccgtcccctttccctcctttgtgcgccggatgacgaagccgctgactcccttccgatcccactctcccgctctcgaaaagcgttcggcttcccgaccggcccctccgcaggccgctcaaagcgcgactcattcggcaagcccatgcccttcttgaccgccggcagcggtggctgtgggggggcgtcgtacctctctctccaaagcggcgcgggagggacctcgagctcgatcgcgtcgggctcgtcgcctctcggctcgccaaatttcacccagcagcagcagcaagggtcgtttgcctcttcgagcagcggcagcagcagcggcctgccgtcggcggccctgaccctgccgcttgccggtggttcagcatcgccaaacaccggcgtcgtctcgtcgcctcgtttcggcccggacggcttcccgctctcgctcggcggcatcctcgaggaggaagagtcggagggcgaggacgagtcggaggccgcccttgacgacgaggcgggctcggaaaaggcggtgaggcgcgcaagccagcaggtgagcctgccgccggctaggtttgggcgcttcacaggaaacaactcgccaaggttgccggctgctgcaggtccgggctggcaagctgcccctcctcctcctcctcctcctccgccgctgccgtcagcggccggcccacggttaacgaacggcgccaacggtcgcaacggcagcagtggtgcacgaagcgaggaagaccgtctccgttccttcgcgttcggcaacgccgcctcctccgccggcggtcgcttcccaagtagtccgctcgccggagccgctttcgtccactcgccgccgccgctggctcaaggcggcacggacgacggcgtttcgccggcgacgtttgctgggccggcgccttcctttggcgacgagcaggacgaggacgacgagatggcgctgcctcctgctgtcagtgacgacaagccgagagacgagacgacacgcttcagggcgtttgccttcccgcgcgggacggtcgccgcacctcgtccgccgacagcagcagcagcagcagcagcagcagcagcagtcgtgacagaggccgtcgacgagacgtcgcctgtggccgagtcggcaggagagtgggagacgctcgacgaggacgctgctgctgctgtgccggccgacgacctcgagaagacgcccaaccctcctcagccgtccacgttctcatctttgccccgagaaggccgagcagcacccatcgcctctccgcctctgtcaacaaagaaggcgctgaggccgctgacgctcgcagctagcggctcgccgcagctcgtcacgtcccctccggcgtcgggcacatcgcctaccggccggcgagccggcctgcggccgctctcgctctcgctcgcctcctcttcaagctcatccacgcccagccggaaccgcgcaaacacgtctttcggcggcggcgggtccgactcgtcgtttggtgccggctcgccgcctccgactgtctccccagcgggtcgctacggcgggctgggctatggccggccctcggccgtcggaggcagcggctcgcgctcgaatctctcgctctcgagctcgacctcgtccgtcagctcagcgacgtcgtcgtttgcgcccttcaacggcggcgggcggtcaaacagtgtctcatcgtggacgccttcgcctggccgaccgcagcagcagcagcagcaggcggccgtcaacggcgagaaacgccggtcgagcatctcgtacggcaagagcccgtcgccttctcccgggggcgctaccccgcccggcagcagcagcggtgcaggtggcggcaaacggagcttggcgaagtgcccgccagcgacgacgacgcggccgctgtcgtacctcagcggctcgagctcgtcccggcgtgtactcgcagacgtcggcgaggaccaggaggagcatgcagctgcttctgctgctgctgcggccgaggacgacgacggccggtccgtcacgtcgcccttttcgcacgaggacgacccgttccttcaccgcggcggccagccgttcagcctcgcccgcgggcccggctcctcgctctcggaggacgtcgtcagcgccggcgggtcttcgcccgtcgcctcagcagaggagcagcggctccgtcagcggcttgagagcgtcgagagcgagcgcgatgcgctggccgaggacgtcgaaggctggcggagccggtgcaagctgctcgaggagaagctcgcagaggaaaagcggatcgccgtcgtcgagcgcgacctctcgcgcgaacgcatccggaagcgtgcgtcctccgctctctctctctcgctctgcgcttggctgacatctttcctgcctgtttgcagtcggcgaccgcctcgcgagcctgacgcccgacgaaaacacctcggccgaccacttgacggcccagacccggctcgtgaccgagatgcgcgaccagatcttttcgctcgcgtcctcgctcgcgcggtccgaagagatgcgcaagcaggccgaggagagcttgcaggacgagctcgatgagcgcgaaaggcagattgccgaggcggtcgacgacgatcggaggtcgaggcgcgctgctggtgttgcgatctcgccggcgacacaacagcagcagcaggctgccgccgcaccgccgacgccgccgttgctgagtgggagcaactcgtcggtcagctcaaacgtctcgaccaaccggtcgtcgttcggcgccgccgccgggccgagccagcaggccagtagcgcgggttccatccgagtcgcaagcgacgacgacgccgggaccggcagcagcagcagcacgggcggctacgactcgtggaaggcctcgccttggggcgccggcggggccgtcatgcagccgaccggcgagctcatgtcggacggccgcttcaatccggtcccgccgcggccgctcgaggcgctcgtcgaagaaactgacgaggaggaccttcacggccacgacgacgacgacgagcggcgctcgttccacgcgccgctcgaatttgcgcaccggtctttcagctcgtcggcgtacgacctctcggacgacaatgccgcgctcgggctcgacaacagtggcgactttgacccagacggctttgacgaggacctcccgcacaactttttgtcgccccggcccgccgacaacggagatgatcaggaggaggccgacccaaagacgccggtgccgccgggcttccaggcggacctgacggctccttatggcagcacggccgtcgagagcgactacgtctcgtcgtccgcccccttcgcagcctatgagccgcacccgccgccgctgcccgccatgcaagaaccgccaaggcagcagcactcgaagcgccactcgctccagcggacatgggtgatgccgcgcgggccggtcgtcgcctcgcccgaggagccccagggcgagctccagacgacgccggccgcatccgcgcgcttcagtggtgccgccgacgacgaggacgaagacgtcaagccgttcggcacctgggtcgtccctccctcgccctttttctcgaccgagaccgatgacagctcgcgctttgtctcgaacgcgttcccctcggccctcgcgacgccgaccttcccctcggccctcggctacaacaacccgccgacggcactcttcaaccagcggccagcagggccccccgcaggcgctcaccggtcaaatggcagccggtcggtctctgcgcccttgccgtcgagccgcgcgccgcccgtctcgcgctcggccgtctaccacgccgccaatccttcgatcggctcgatggcctcatcgacgccgaccggcatgagcgagtcgacgtcgatgttttccctgacgtcgctgacgtcgacgatcgggtcgtttgtcctcccaccaaagggtggcggacctggcggcgtcctctgctcggtcatcccagaggacgacggccagacgtccggccagtgggtcgtccgcgctcacgactcgcccctttcggcctcgacgggcagcggcggccggcagtccatgtcgtcctcgaacggcatcagcggcgccggaggctcgtcgctcacccggagcggctcgtccgcctcgttccgtgcgccccagtcgtcggccgcccgccgggcgagcaaggcctacgtcgacccgcgcaaccagccgccgccgtacgcctcgcccgtcggcctgctcgacttccggcagacgtgctgcggcgacgactggagcgccgttatcgagctctagatcactctttctctctagctctctcctttgctttgttttcgcaaccccctcgctctccaaaccctgtacatctgcgcagctcgcagcttcgttctccgttcttcgccctggccggccacggcgaggccaacccccctctcgatgcttattgtacaaaacctcgcgtgagcacaggctgccgtcgaggggccgagcgcggagaggtggcgacggggtgctgatcgcgggcagggtcatggaaggacagcggtctcattgtgagtcagcgcttcagtgcggagggcggagagagcgggtgtgatgcgaggccggtagggtgaagggggatggggatagaagagcgagatcgaagggcatccggacgtccgggattggatcgcgtaggcccaggagcccgcagcgtcgcagttcgctctatcaaagctcatggcttagctacgccaggaaccgacgacctcgtctgccttggtcgaagagatgatgccgaagatgagaaagaaaagaggctgttcatgaagatcgtgatggaaaggggggggaggctacggagagctgattacaactaaggaagagaaggagggggctcagagaccaggagagagagagggggagcaagtatgtgtggggctgcaagcgaggccatgcaaagatagagagagcggggcgtgataagagggcagagagaaggagagacctagatccaggcgttggggccgggagtggggccgatgtagccgatctcggggatcgggtaggcccggcagcccgcagcgtcgcagttggccttatcgaatgaaatcgtgtttgtacgccaagtgctgacggtttcgtcggccttggtcgaagagatgatgccgaagatgaggatggcgcagagcgggatggccgagccaaagccgacggcgaggatgtagttgtacttggaccaccaggcgaggtacttgcgcttgatgtggacctggaagatgtaggcaaggacgacgccgggccagtagttgacgagggtcgagtaggggttccaggcgagcacgccgtaaagcatgacgacgacgtgggccttggcgaagatcgaccgggggtacttcttcgagtaccaccagaaggggaccgggaggatggcgccgatggcaaagcctgcaggtcgaggggtgaggaaagtcagccaagagagcaggtaggaggtagagcatgaggatgagggactaaccagtcaggagcatggcgtacatgccgcccttgccgaagatgcgggtcgggcccagcgtgccccagaagacggtggcggtgaagaaggtcgtctcgccattgcagtagaagtgctggggctggtcgagctcgcagatcttggggagcgtcatctgccagttgaggatcgaggtggcgacgcagcaagcgatgatcgagccgtaaacctgcagaaaaggggagagaagtcgtcagtgtcagctctggaaagaaaggcaagcggccggggcaggagacggacctggacgatgaaggtgtagcgctggccaatcttcatgtaatggccaagcttgaggtcctgggcgaactggatggcgttcatgcacgagacgacgccgtacgacttgaagtagttcattgcgagcgcgttaccagggtaaatgagacctccgatgaactcggcgaaaacctgtcaataatggttagaaagccatcagttctcggttctgaagaggagcagccggccaggcagggacggacattgagcgtgatctgggctccggtgatcgaggtaataatctgatgagacggcggaggggctcgtgtcagcgggagaaggcggcttcgtcaaggtcagagagcagcacgtacgccgatcgggatgacgaaaaggatgcagagcgcgataccgaagaagatggccgagaccgaggcgttggtcgggtagagtgtcaagccaaggacaccgagaacgacggcgcaaaccgtgaagatgaggtaccacctggcggcaagagcagctggttagcacagagcgaccgagagagagagagagagagagagagagagagagcaaagggcgacgtaccactcggggacctcgtcgtactgggccatcgtctggttatgccagtccttgaacgagaggttgcctttctggccggcacggatcgacttgtaggcgaccttgaagccgttcgagatctccttgcggtggtagaggagcgtgtggacgacgacggccgagtaggcggcaaagaaggccgtatagaggacgatgctgcagaaggagaccggtcagtcgcggcagacgtgctggcgcagggaagggcaggacgcacttggaggcggccatgtagggctgcgagtagttggtgtacttctcgtagtcgagctccttgcgcgagtcgaggatcatcgagacgttgtacgccttgccctggttattgaagatgcggttggagacgagcgggaggtacccggcatcgagcacgttgccgtaccagaaaccgaggatgatgggcgcggtagcgagcatgccgataaactggttgagggtcgagaagaagggcaggacgaggacagtcgagccgtaccactgcgaccagtccagcggcgggatcgggttgaggccaaggccagagatcgagccaaagacggcgttgatcgcgaccgacttgggggcgatccacgagatccaattaaagtacgagatgcctggagtgaggagaagggtgggagagcgggtcagtcttgggctcgacgatgaaaaaaggggggaggggcgggacgtacactggacgagcgatccgggcagccagtaccagcagaacatcatggcgaaggtgatcatgaagaagcggaagcgcgagatgcgccagccgttggcgaccgggttcgagttcgagtggaacgacttgttgagggcgatcgtcgcgaggttgaggagccagatgcagtgctccgggtagacgatgaagcgccgggtcatgccggcaaagcccatgccgatcatctggatcgacaggccggtcaggatctggtagccaaaggcgcccgcccacttctggccgtagaagatgtcgagttgctggacgatgaggacgttgatcgagtagggggcgagcatgccgacgttggccatgatcgtgatgagcatgtgctccttctcggtaaaacggcccgggttgagcgtgaagttgtagccgcggaacgtaaagagcgtcttggtcggcaacgtgtattccatgaacttggcgagcgggaacgacagcagctggacctcgttggtcgagagcgaaaaggtcggggtacggagcgagaaaaactggttgatgaacgagccgacgccgcaccacatcgtgccgatgacctgaagcagagagcacagaggatcagccgcctgttgcctgcgttgtagttcagacagcgcgaggacgcacccagacgcggaaggtcgaggcaacctcgttgtagtcgtcggtcgccttgacaacggcccggacctcagggtaaggcgacgagaagcggatgagaccggcctcgatcttcatctcctcgagcagctggtcgtagttctcaagcgtcgacgagtcgccggaaaggaagtactcgatcttgtccttgacctgcgaggggaagttggggtcgtcgtggtgctcgagccaggcgtcctcgagaatctcggtcgtctgctcgaccgtcagggcaatcgcccggtcgtagatggcatcaatgtcggcggcgaggacgacgaggtcggatgagacgacagcctcgtgctcggcgtccaggacctggacattgcgctgcgcggagaaaggcggggcgaggtcagtgagggtcgcgcgcgcgcgagatggcggaagggcgacgcacctcggagcgcttgtcgtcgatcgggtactccttctcgtcgctgtggcggtcgtggccgaggacggccacgctggtggtctccttcttctcgtccattttgctggggacgcccggtgcgcgggggaaaagggggtgccgagagctggaagggggagtgggtgctgccggtggtagagagggagccgggcaggatgagatgggtatggtgagaagacgagcttcgccataggctggcggtggcctataaagaggtcgcgcgttccctatgcacgtcttggcacggttgcagcatgggtcgttctggtggctgagagcaccgcgcggtcgcactcataccctcggctactcaaagccgaggaacggagggagcgcatggtggtcgccgcgttgtctttgcctccggccgcacacgaccttccctcgataagaagctatcggcagcagaccatgctgtcgacgaggcgaggagggcgaagtatcagccgcgcgcggtcggtcagtcggcctcgtatcaggctctgctctcgccgtcgtcctgacggaccatcagcaagggcggcaggttccgcgctcccgttagctgccgacccaccgagcccgcggccggatcgacaagcaacgactaaagagttgggcagggaaatcgcgctaccgttctggccgtcgagacgggcgcaggttggcggccagctcggcgccgctaagcaagcctcgactgccctccaggaacgcatcatgcggtcctggtgggtcgaccccttcgcgcagccagttctggacccggcctcctctagctcattctgactcgcaagctcgccatcgcatattcttttgaagcaagttaaggatgaggtgcagtggtcaaagtaatctcggatcagagaacgacgccatcgccgacacgaatgggcggagagaccgaccaataagctaagcgtttgtcgaggagcacacggacacggacacgaggggggcgtcggccgacgaggcccggaagggggtctcgaacacgacactgccggtgggccgggcaggttccacagacgcgcgtgaggctgcatgcatgcttgcttgcacctttcgcacgccgactgctgacctgcagagcaagcagcgtcaggcgccgcaaacgtcgacgcgggcggtcaggaccgcgacgacacgctccatctcggccaggtcgtccgcgctgttgaggtcgcgcatgttgcctgctcgctaggtcgtcagcatcgttgaccaggcgtctctcgggtcagcgagcaagcgtacctgcaggcacgccgagatcgtaagccggagcgtacgactcggcaaagtcctccgagaggtcctcgaccggcagcgggtgggagggcgccagcggcggatggccaagcgcgattgatgtgaactgagcccaagcgcgagcaacggaaggatgattgtagccgcctgaggaaagaggggaggagagggacaagaggggagcggagggagggtcagcgcagacgacgctgagagttgcaatgctggacgcgcctcccccgagcaagaccgtccccaagcgccagttgcagatctgccgcacggcccagccgagatcgccaggctcctcgccggacgagaggttccagacgcccttgccgtctcgagcgagcccgtcaacaccgcagcagacgacgacgaaatcgggccgccaggcttccttaacttgctcgacggtcgcccaggcgcgggcaaacgaggcggccgacgtgccctctgcgagcggaagcgagagcgtatgtggcgaggccgtgttgggcgtggtctgctccgagcccttgcccgagggaaagaagagtggggcgtggtgatggatcgagagagtcaggacgctcggctttgatggcggggtcgagaggaaggcctcggccacgcctgcgacaaaggaacggcccgccgtcagcgctgcaacagatttgctaagagaaaatcgcgcaccgtcgccgtgatggatgtcaaagtcaatgtacctgcggaagcggtcgagtcagcgcgagggcaggctgcaccagtgcgagggagccgacgcacatcacccgagccttccgcatcttgccctccgtccgctcgtcgggcacacgcttctgcccgagcgccaggacggcgagaacggcgtcgttgatgtagcagaagcctgagggcccgtctcgctagtcagctttggatttgcggtcaagtgagcgcgaacggactgaccagagcacgacgcccgcttggcatgatgccggccgccgtcccagcagatgccgacatctgcacggttatcacggacctcttgtacgatggcgagcgatccgccggccacctgaaggcagtattcggctagtccgtcaaagggcggcgagtcgtcgacgaggccgtagcgggcgtgccgcgtcgtcgtcgtccgctggcgctcggccggtcgagcagatcctgcatccccatcggttgacgagcaggtagacgaaggagacgaccgacgcccgcgccgatcgccgtctgctgggccgtcctgggagaggaggaagtctggcagaggtcggatcggccatcagctcaggggcgcccgcagagaacagccccccttggcaagaccgaccgaccgacaaagtcctcgctgtggaagcgtgcgagatccttcttgccgatgatcgccggagcgaccacccttgcccgggccaggtcctcgcccgaccggtcaagcaggccgaggacctcgacgagctcgtgaacctgtcggctccggccggggttcgacggcaggcggtctgcgagcgccgtcagccgagccgagctggcgtaaacgacgcgacgggagaagatctctgggagggcgtcttgagtatcgccagaacgggctgtcatcgtcagctgcccagtctgagcgtgttggaagagaaagaggacgacgctcagccctcgctccgacaggagctgcgcgcctcgaccgccgcggccggccgtttctttctgccggtcgattggctggctgcccttgcttgctgggccttcgagctgccgactctcaccctccttcctcccctttgctttctctcgatttcgcgatgctgcctacgctcctccgccgtcctgcaccctcggccgcgtcgctcattcgggcggcatcgacctcggcctcgccgctggccgtctccaagatcggctcggccttcagcgtcctcgccgcgccctcgacccagacgagcacgcagacggcgtcgctcacgctcgtcctccctgccggaagccgcaacgagacgtcgacgggcgtcgcctcggtcttcaagaactttgcctttaaggtgcgccctcttgctttggcgggcggcggcggcaggggtgttcgacgtcggggcaagctgctcctcgatcctgcgacccccccagcctcgcttaccttgctcgcatcgggagcagcggatcgctgacgctgccgctacgtactttctcgcagagcaacaagtcgggcgagtcggccctccgcgtcgtccggcagacggagctcgtcggcggtcagctctcggcgaccctcacgcgcgagcacctcctgctgacggccgagttcctcaagggccaggagtgcgttgacctctctcgagtgctcgctcatcctcccctctgacacgcttccccttatcaggaagctgcatctacacacgctcatcaagaacctctcgccgagccacctcgcgcatgagttcaacgagtcggtcgtccacacgacgtcgctcgagtcggccgctgcgtcggcgacgccgtctgtcgtcgcgctcgaggccgcccacaaggctgccttccggtcgggcctcggcaactcgctctttgccgacccgcacgagcccgtcggcctgaccgatgtccacgagtttgcggcctcgctcgccaagcgccaggttggcatcgtcggcaccggcctcagccaggacgagctcgtcgcgacgctcaaggacgtcttcaccgaggagctcgccggccaggaggccagcaaggcccctaccccggctacaaagtactttggcggcgaggtccggatcccgattgacctccacaacgtcgccgacggcgcaaagccgacgctcgtcatcgcctttggctcggccaaggcggcctcgcctgagcagctcgtcctgccctacctgctcgccccgcggccgtcaatcaagtggtcgccgggcgcggcgccgcttgccgtcgacgaggccggcacgactgtcgaagctttcacgcagtcgtactcggacgctgcgctgctcgtcgtcgagatccaggccgagggctcgaagcggctctcgtcggccggcaagcaggtcgtcggcgccctccaggcctttaaggctgacgaggagaccctgaagaaggccgtcgctcaggccaagacggccgccgccgagcagtgggatagcgcagcctcgctccgcgaggttctcgccttggccgtgcgtccgatcgctcgacgacatcgtcaggcgcacatgctgaccttgtaccgctccttcactcccgctgcaggtctttgccaagaagcccttgtcactcgagcagacgctcaaggcctttgacggcgtcactgtcgacggcgtcaaccaggcgctcgctgaggccctcaaggccaagccgacggtcgtcgctgttgcccggcttgaccagctcgcttacgccgacgagctcggcctcaagatttaagcagaggcatagcgattgatacgttagacgggatgtcgcccccgggcaagtccaacagaggccagggatggaggggggggcggggcagcggcccgagacggcggccgactcggaggccgccgctgctttagagcatgaacccccggacgcccgcgctggaaggggtgccgagggctagtattgcagatgaatctctcccttttcaaacttcatgacgacgagggagcgagcgtcgttcgagtcgtcgacagggaggagggcggcccgctgctgtggattcgtctccgcggcgccggcctcaacccgagcctctgccggcatctctcttgcctccctctcccgccttcatccgaccctcgactatcttcctctcctgccgccttctcgtgctcccaacccgaagaccgggatggcgtcctcgtctacacgcaagggcgcgccgaccggcctccggcttcagcggcccggcgggggcgagtcgtcgccgacggcgggaggctggccaggcgggctctcggtcgacacgggcgagagaggtaactccccttcctccggatcaaccgattgttcgatggggcctccagagagcgccttctctgcttgatttccatctcggctgtcgctcaggctgtcactcgaggaggttcctgctggtagggggaggcgacggaggatccccaggccggctgtctcgctcgtctctgagctcgctctcagcatggcctggctctcgtccgagctgctaccgcagacgtcgctgtgccgaagctcgctgcccgggtctgctgctgacgatctgtctggcctaaaccgcttgcctgcctttcactagcaggctatcagtcgggcgatccctcacccaactcgctctactctgcctcgccgtcggcctcggtctcgtcccagatctcgcgcaaccactcgttctcgctcgactactacgccctcccgtctccggcaccgcagtcgccgtcgtcggccggtgcctacccgttgcctcccgccccgccgaggtcgcactcgacgagcagcacctattcgaactactcccagggcgtcaccccggtcgacggctccggtcccgaaacgggcagcagccatcggccggcgtatctcggcaacctgccgcagcgagtctcgtcaaagagctcacctagcgccaacggtcaaggccactcttacgcggacccttcctctgggcgccagagccccggcgccctcggcggagagatcaccgtctcgtcgccgcccctgtcaccgggctcgcgcaaggggtcctgggccggatcacctctgggcggcttcctcgccctccgcaagagcagcgccggccggtctcccaagacgcccgactcgcctccgccaggtggccgccgaaagtcgtctgtgacgacgaccgttggcacatgggagcagccgaaccggccgccgccagagccgccgagggatgaggaggtgctcgacatcagctgggcgcgcaagatggtcgaggaactggaggccgactctgacggctcgggctcgagcaacgatggcagccggcgtggcagcacgagcacgagcggcatcccagaatttggcctcggcgtcggcctcgacgacagccagaacggcgatagctcggcctacagcggggacgaggcgtcgtcgaacggacggggcgacgtcccgttcacgcgttacgaccggccgcgggccaaggacctggcgtttttgcctggagacgcgacatacaatctgtcgtccgcctcttcacactcgcatccgtcacccagtccacccggtgctccgcagctgccgtcgtccgagacgacgcctcgccaaccggaccacccgtcctctggtcgggcgcctctcggtgtcgggccttcttcccgctcgtcgtcgcctcgatcactcgcgagcgacggctactcgatccacgaggcccagccgcggcccgagctcccccattcgtcgagccttgaggcaacaaatcgccggatccacgtcatcgagacctcgcccggtccgagcccagcgacttcgacccattcgattccgccctccgactcgctttacccgacgacgagtcgcacctcaagcaatgcaggcctcaccacctcgcctgccggcagcggctcgtcttcccagggcgcagccgcaggacattcgcctctcctctcaagcggccgctcgggtttcgcagacgaggttgatcgccgaaggtcgtccgacaacacgcgggcgctggcgtttgtcattcctgccggcgggagcgagcgcagcatcggccagcttaacgacgaggtccgccacggcactggcgagatcgtccggctgaatgaattcccggccgactaccaccagtttggcgagggctcgcaccgaacgggcccgccgcgaagccgggaaggcgccgagtggagcgcgccgatacctgagctccagcatcccgaccaaacgccagaagactacaataacaacggcgacgacgacgatgacggcgttcagcatgaggctggctacgagtcgcctgctctgaaagccgctcgtgagcgcgcagcgagggcgaggagcctccatctggcgagtatccaggtcacgcaggcgacgagtccgacgacgctcagcccgcagagcagtcctggcctgcgggcctattcgttcggcgccgaacaagccaagtgggcgactaaggagggccgatcgcctcgacaggtcgagccacccccgctgccgccgccgtcgtcagatgagagcaggtcgcagtcgctgttgctcgcggtcgagcgcccaaagcgcagctcgatgaggtgcgtgttggagctggcccccttcttctcacttgtcgtttctgactctctaactctctggtcgaccgcgtctccctgccctgtcgacgcaggccggtgcgaactccgtcaccctcgcctttgacggacgtggctccgtcagacgttgcgaccgtcggcccgctagagatctccccgaaacggatgtcgacgccctcgcatgccaagcagtcgtcgacgtcgaccattagggcgtcttcgacgagaccccgccggcgctcgtcgccgacgcttgatgacgcgcccgcccgccgccggccgtcgtccagcctcgaccttccggcatcgtcctcggatgagctgcgagctctaagccagtcacaggacccgattccctcgagtcgatcgagcggcacgcatgcgcgaacgctcgaagagttgacggccgtcctcgatctggccatcaacgactctgagctcgacagcaacctcgcgatcggccccaactttggctcgccagtccggaggagcttcgacgatggcgccgcagacgacggcaccgtctcgccgaggtcgtcgcatcgcactcgtgcgccttcgccagaacgcgggcctccttcgaacgccaatcaggccgtcgccgcagccgcagccgcctcctcgtcacgaccgcctgacgtaactgcaggccgctccagcatctcagaggagaagccaaaaccgcgacggatgtcgaaagaggtcgatccggcgaccaagcagcgcgggtccacctcgagcgcgggagggccggcggccaaccgcagccggatcggctccgaggacaaccaagccggccggtctccgatctccagccagcagtctgtcagcggcccgcctccgtcagctgtccgcaagacgtcctcgatggcgtcgcttgcctacccgatgggcccgccgccgccgccgccaccgaccacaggcactggtcgccagcccttctacgctaacagctcagtcaacgcccaggcctcgcgcgtctcgctcgccgagagcacctactcaccgacgaccgggtcctttgcaaagacgggcaagtggccgcgggcgatggtctacaccgacataaagtcgatgcgctcgccgggcgagcggtcggtcgcctacgccctcaagatcaacgagctccagcaggcagagaccggcctgggcgactggctgcgatggaaggctcacggcggaggtcagcttgctctcttgactcgctttcgcccggtcctcccgctgacagtcagggctcccccttccagactcctcgaggacggcctatcgtcgcaactcgccgagcctcctgggaacgatcgtcgagcccgcctcgcgcaacgtctcgtcctcgtcctacatgtcgggcgcgtcggaggagtttccactgcggggcgggccgacgatccaggcgacgcagatgcgcaacatctcgcctccctcgggcccgccgcccaaccttccttacccgcagctcgcaccgggaatcgacggcatgcgtccgtcgccgtcgtcggccagcatccggacggtcggtccgggccagggcgtcaagccaaacgagcacgcgccgatgactacgcggccgtccatctcgtcgtcgatcgcctcggtcgcgagcaatccggccagctttctgcacgcactcggccgtaggggctcgacctcggccagtcaggccatgaggcacaaggcacggtcgccgccctcgagcatcagcggcttgcctgtgcccggcggaggcttcctccagcggagcgagctcagcccgcgcaagggcagcgtccgcgggatcgagatctcgggcccgacgagcttcagcaagggagccggtcaggtcgacagcgagatcccctccggtcgaacgagcatcagcagtccgctcggccctcgtgcgtctggcttttgcaaccctgacgctgctcagagcactgacttttgagtcctcacaggtgcgccctcgaccacgtttggcggcccgtcgcccctcggcagcggcgaacgcatgtcgctcgaggggtcatcgaccggctgtcacacgctctacgccctcaccccaccgccgccgccgacccagtactccgcgccgcccatggctgccgctccgtccgccggcggtcaatcggccgggctcaaggagatggtcgaaattcttgacgaagacccgcgcctgctgagcaaggtgagccctcatctcgcagcaagacgccgtcactcgacctctctgaccctcgtttccggctcatccccttcgcagtacctgcagcaggccggcaacaacgtcgacgccgctctctcgacctacctggcggatcagtccaacggcacgctcctccgcatctgagcccctcattctcatctcccccccatgccttccatccatctctggtcatcatttccttttccaacccctcctgctcttatcctgttactcgcatttcatgggccccgtcgaagtgactatccaggtaaaggggttccagacctgggtttcccaagttgagcgagatcttgttggatcgagctcaaaccttgcccactggaagcaaacgacggcgtcggttctgaatctgccgcccaaccgagggcgtccatcaggcgattcgggtgaaatcgaccgggggagggtgtgtgacgcctgcggggtcgggctcgcgcgagggtggaggagttgaacaaaaaggtgtccaatcgatacctcccggcaaggggtacatactttttctaccgaatcttatccgactcaaaccagacgttgccaggctggtcagacaggactagacgaaatgctgacgacaagtctgccggcgattcagtcagtcatagggacggcaggaaagccttgtaaagggggggggtccggggatctcgcgcctgcgagggccgagtgactttcatggaggatcttgtcggatcgctacaaaaccggtaccgctggaaattcctcgacgatgcgactccagatcaagggagattggcgatcatccaatcagagggtgatcggctagcttaaagaggggggggggtgcgcgcgggtcctgaggcgcaggtcgctgggctgctgcgcccgcccgcttcgacctgtcgccccccttcgctgcctgtcgacgaccaccatcgatcctgagagcagtaagagtctcaagagggtcagtcctgtccgtgctgtagtgggccgtcgtcggggcgggcagggaaacgagaccgccggcgctgacccgttccccccgccgccgtgcggcgggcggtgggccggtcctttggccctgccttccctgcctgacgtgcgcaagcgatcaaagcaagagccgtgcgtccccttcaaagccataaggtctcttttgccgaacgaactttgaagccgagagagaaggaagggtggtcgaggagttgagggcaatggcgaacgaacgaagccgagcgaagagatcaaccccgtcggccgtgccgtctctttgtcccctttgctccgaacaaccagcatctctcccttccactagcccgactcgtctcgtccagaagcgaacgaaaaactcgcggcctacacctctaggaatcatgtcggccagcagagcaccctccaaccttgatagtcggccatcgacgacggcggcgaaggcggcaacggccgagctcggctccgacgccatcagcagccgctcaaacgccccccggctcgcactcgcccacaacgacaacgccggcgagcggcaggcaacaacggcgaaagcaagtggcgaaagcgagtgggcgtcgctgtttgcgatcgtcggcggcggcggtgccggcgggggcagatggatcagtcgctctgccgagcgactgatccatctgtccgtgacttttgcccccaggtcgagcgacaccgagaagcgcaagcgctttgtccagctcgtcgacgacgtccgcgaccggggcggcgaggccctcatcttctcgtcgatgcacgagtctggccagcgtacgtccccccttggctcatccacccctcccttttcgcgactggactgaccgacgagcgtccttttggtggaaccggcgatgagggcagagctcaaccagctctcgggcgtcgcggccatcctcaacttcccgctcgacgtcgaggttgccgaggaggaggaccggctcgagcgcgagcgggccgcagaggaggagaaggacaggctgcacgcagaggcgatctcatgaggccgctgccacgtctgcctgattgcgctcgaggaacgcgaggagggcgtgcaagtgcatgtgggagtgaggtgtccgtatagaaggccggggcagggggcgcgtgcggcagaaatgcaggtggagggcgggagtgtcctttgagcgagtacaaattcgagaggcgtcgaaagataaaagggtcggttaggatagcgcgtgagccgagagttcaagttgaaacgtaagagagagaaagtctgtgatctagggaaggaggagagggagagggagagtcgactcgagggtgcccctcagtagctgcccttccacgagctgggtggcgctgggctcgtgctccgcgggctcgcaggcctcgcctcgcgcgcaaacggcgccgagggcggcagaagcggcgtcaagtttgacgcactcggcgtgcgcgtccgtccgccaggccgccggtccgagcctgacaactcggcccggcccgtcttgggcggcgaggtcgagaagctgacgagcggcttggagccggccgtaccgccggcgaaggaggctcggtggccggctggcgcggggttggacgactgccgctgacgggcgtaggtaggcgcctggtgggcggcgctctgcggcgggatgcgcgactgctggtagtagtcgtgctcggccggcccgccgccaccgaggttggtcgacgaccgactctggtgtccgctgccgccgtagaaggactcgcgcgacggaaggggcgcgtcggccgtcgagaaacggtcgcggcgcgggcgtgcgttcgagcccggagcgccgccgccgtactcggaccgcgacgacgaaaaggcattgccgccgcccgacgagacgtgctgcgggttccaggagcccaggtccggcccacccccgccgccgccgtaagctgaggcaacgtagccaggtccgccaccgccgccgccgtacatgctgcccgcggaggagaagcggttcatggccgggttaaagccgccgggcatgcccatgccgaggccgcccatggtcgagggcgggaagccggcttcgctcatggcaccgccgccgccgccgatggtactcgaccgctcccactcgtcaccagcgagctgggcagcctgggccgccatctgctgctggaagtgggccttggccatcatctgcgggattagcgagaaatcagcatgatggcgacgacgaggctaaaaagggcaacgcaccatcccctggtactgcatgctcgggtcgccgctggcgcccatctgcgccatttgcatctgcatggcgatctgggcctgctgggcttggagctgcatctggaagaggaacatggcgttcggatccacgaaagatggcagcggcatgtgcccgccgccaggcgaaaattgctggaaggcgggcatgccgccgccggcgccgaacgggttggcgtacgggttgtggaacggctgcggttgctggccgagctgcgggaagggcatgtactgcgacgcaggtgcctcggcagcctcgtcgtcgtcgtcgtcatcctcgtcaggccgatcggggtgtggggcgctgccattggcgtagtggccgagctggagcgggcgtagcaaagggcagcgtgtcagccctcgttcggtcgacagacctcgcggcaaagcaatctgcgtaccttgaccgctttcatggcctcgttccgtcggcgctcgttgcgttttcgctcgagctcggcctcatccggttgctcgtcggtcgcgtgggcgagaccgagctgaccggcatccttcccaccgatcgtaggaaggcgcagggcttgccgaccaagctcgctgctctcgcgcggcgtcagcggcatgatgctcgagctgctctcgcccgtcgtccggccgctggtcgagctgctcgacgggctgccggacgaccgcggctgggtgtgaaaggccggacgcggcgggaactgggtgctcgtcgtcggcgacgggatcgagctagcggagacggaccgcgtggtctgcgacatgataggccgggacaccggatgctgctgcaccggcgattggaggggcattctcgccgacgagggcgacgtcgagaagagcgaggtccggtccgagagcacaaaggtcgagggctcgtccacgaacgaggtccggcgaaggatcgactttggcggcggccccttgaccgacacggatgaggcagcagacgaggacgaggagctcgcaagggacgagagcgagttggtcgacgtgctccgtgcgagaggaagcgggcgcgagaatggactcttgcctgccgccttgggcggcacggtcgggacagcctgcggagaggccgcagtcacacggagcagagggttcgaggctgatgagagcgccttgtgctgctgtgcgcgagcaggggtctgcgcgctagcggctgccgagggctggacgagccggccgagtggctggtcgtccgagtccgagtcgtcggcgttgtcgagctgcttgcgatggaggtctggcgccacaaaaagcgtcgccggctcgatgacgggcggggtcgtggacgttgccgccggcgattcttctttgcgcttaaagaagctggaacgtggaccggtcgccaagctcgcactgcccttgggcgtcgaagacgtctcgtcgttgccgtagccatccgaggtgtcgctgtcttcggcatgagtcgcaagtcgctccttctccatccggttgaggacgctctcgctgccgcgccggcgagcgacagggcggttggcatcgatgcgctccgaggcgaggccagagcctaccagcggccggtgagttgcgggctgcggccgaccggcaatggcattcgcagcgacggcagcgaggcgggctttggcggctgcgacgtccgaaagaatttgatcagcgtcgccgacgcttgcccggcggatgctccgctggcggtccaagacaggcttctcgagctctgtcgggagcgacagcagcggctcgcgtgggctcttgcctaaccctgctgcaccgatgacgctcctgcacgaggccgctaagccaggcgcaggcgatcgggcccttgtgttcgagtccgtgcgagaggccggccggcgcagctcctcttcgctgtcggaggacgacgatgccgacgagcgctgcggcttcgacggtggcgcgcgtttggactcggtggcggcgacggcttcggcggcagaggcagcggctttccgctgagccgcctctgctttggcaagctcgtagcgcgacgtcggacgtgcgatcgggccgcccgaccgggccggccggctgccgacggggaggccggtgaccgacggcccaggtgactggctgcgaagaccaggaggggaaaacgccgcagtctcagcttctgatgacaacttggattagcgcgagggactgacgccaaagtagaattgggccgcttcttggggctcgccggcaggctctgactgccaaagcgtggctgtgaaggagcgacaccctcatcggccgactcctcggcatcgaaacgagagcggttgtcgtcccggcgactgagggctacctgcgactgcggctgatgctgcggctgggtcagactgagcatgctgctcgatctcggcggggctgcgcggatgaaggaggcagccgtcgaaggagcggatgctgctgtcggagtcgtcgccgacactggcgacagggttgagtccgccggcgtcggcgttgaggaacggccgccatcacgacctaacgagggcggcgtcgatgtaggcgaaggaagggtgagagaaacgccacgatggtgaacgggccgcgatgggacgctgaagccagacgacgacgactgactgccgccgggggtcgatcggtacgaagaggcttcgttaccgccaacaaaagtcgagaggttgacggccgagccgccccggggcagttgccgcgaagacgctggcggtgggaggggcgacaccccagcagcacctgccccgggcgtaggcgtactgcgaccgcccgaggcccggagcatgccgagcggcttgtcatcgtcgtccgacgagtcgtcgacggccgactcgttctgcgcaaccgacgttgcctcgacggccgcggcttggagctggatatcctcgcggccgataacgagcacgtcggacgacgccgcgccgtgaaagccagccgacgaccgcctgcgccggaaggcggcgacgctgacccgccggcttttgagctcagcctcccgatcgacgtccttttcgggactctgaagctcctcaacgccggcagtagcgcggcctggcgggctgaggggctcgctcgcgcgcgtccactcgtacgactgcgaccgcttgcgctcgcccaagcccggcctgggccgagcgccgagccagcctccaccaccgccggtcgtcgacaagggcgacgcagagacggcgacggccgagcctagcaagagcgactcgtctggcgtcgtgattcgccgagccgagatgacgcgaaacgactctgcaggcgaaggtggccggccatcggcgccgatggctgcgttcgactgaccctgagacgtccctgacttgctcgatgacggaatcgagacgcggagcgcgtttgcaaagaaggacgacgagcgctggcctggagatggtcggggacggggctcgcgtggagtcggctggggggccgacgccgctgcggtcgcctgctgctgggcaagctcagcctcgatcgagaatgagggcgaggtcggcgactttggatgccggtgatcccgcgacgacgacgttcgccgggcggccgagggacgactgctcgtggctcggatggggattgacgacgtcggatggtcggtgaccgaatgactggcctcagcaccagccgagccgatcgcgaccgacgatggaccatgcgagcgcgggagactctcataggcaagaccgtacggctcctgggcggcgtcggcagccttgtcctttcccttgcctccggtcagcgaaggcgactctccaccgctgccgccgctggagaacatgccgagaaaacgacgccgaggctgcttgccgctcgacgaggtcgacgctggcgatggtgggccagagctgatggcagctaccgagagcggaggcggccgctcgagcggcaggtcgtcatcgtcgtcgagaccgtcgtcgtcgtagcaatcgatcggccctggctgctgatctgaaggcggaagctgaaagctgctctgccgaagagcgtccatcgaaggtctcgaccggggcggcagctgactcgaagagtgtgcgagcgagggcgattgaccgaaggaggaacggccggaaggaggtgctggaggacggaggccggacgaaggcgccgccagtggcggatacgcagctgtcgtcggactcacgctgcataggccgagataggtgggcttctatcagcagcgtctccctcaggtcgaggcgcacggaagccaatactgcgcacctcggcagactcgtgcgagaacggtcgtcgacggtcgcaggcgaagacgggtagccgcgaccaagctcgctccctcccgcactcttcggtggaggcggcgatgttgccgaagcagagcctctgagactgttgctatcgctgccggccatgctgtcgtccgtccgaaggccgagaccgagcggagcgaggagcgacaggctcgtcggcggcgagaggccgagtgccgggagttgccagcgggccggatcggacgactcgcgctcgagtggcggcggcgaggggggttgccaacggtaggacgacgccgaggaggaggatgaagaggcggccgtagctggtggtggcatcgcgctttggcctacacggacacggcctccgtcgtcgagctcgccgtcgtcgttgacgtccgaattgagagccgctgaagatcggtcgaacgtcgcctggctgtgctgcggccgagagtaggaattcgatgctcgcggctgctggaaaggagcctgcggaagcgggctctctggccgactcggcccggcccgctggtagcgttgctgctgcggccgatccgaactcgcctgctgctggcgctgctgctggcgctgttgctgctgttgtgtctgctgctgttgcgcttgctggatctgcggctggtgctgctgtggcgtcggcggccgggcgttgacgtaccgggcctctggcggcgagaggggcgagccgggaggctgttcggctgccggctgctgctttggcttgcgcgagaagaggcccatcggcggggaagcagaggtgcgcgcgcgcgcctgcctaaacggatggcgaggaaggggcgaatgtgcagctgccgacggtcggctgctgtttgaacgcaaggcggtcaggtgagacggggtgagggtgtcggccagggcgagttgttgttcgcacaggcgtcggaagggaaaggcaagagggaaggcggtgggcacggtcagcacgcgcgtcggggcgggatgggcgacacgaccgctcgccgcctgttgctggcctcgacgagccgcacctttctttgctccgctgtttgaagagtgtcgaggaggaaggtggtgtcagcggccagccaggacgagtgacgctttgcttgcggagccggacctctgtgctggccctgagtagtgttggccgggacggggagcaagcgtcggcctccgacggagagggcttggcgagcgaatcaagccgatggtgggaaccgacgtgagaacggggcagccggttgcgcgagtcggcgagagaaagaaaagaaggagagagagacgactgccgtaggtgggatgctcgtccgggtcgatggcggtttgagtgcaggcaggaaagcaggctaggtcgtaactgcagctcgatcaaagggcgtgggaaagacgcttgctgcgcgcaccacgcctgcagggacgccggcgacgagaggcgcaacaccttgcgccgttctttcagaggctgcaggtcagacgatggtcgcgtcgatatccgtacgagcgtctcctctgcttgtggcccgccctcgtttgtccttgacttggaagccatcggcgagggcagctccggcaaccctttcgtgcgcgccttttgacgaaccgcgcggcggcgcgacggaaggcagcagcaggagcgcgagccggccatggtcctgccgtcctcgtcgccctgctctcccttcgtccacctccatctctctgaggtagctcgccgacaggatgaagctcgtcaaaccctcatgggtgtatcaccctggtcggtcccttcctgatcctttcgcgactttgacgagctgccgggcccaagctggcccgaagaccgacgcgtcccgctcgacgacgtgcccggcccctctcgcacgcgtgctgaccctcgcatcgccgactctctcgttttctcgtcgtgtaccttttgatgttcgacagatccgcatccgcgacccaacgatgtcccgcgcaagctgcccatctactcgctcagcatccatccggacgcgtcccggctcgcgaccggcgggcttgacggcaaggtccgcatctggtcgacgctcccgatcctctcgcccctcctcgaggccaatccggccaacgcccggctcctgtgcacgatgacgcagcatgatgggagcgtcctctgcgtccgctgggcgggacacggccgctacctcgcctcgggctcagacgaccacatcctgctcatctgggacctcgaccgcggaggcggcggccgcgtctttggcagcactgaagtcaacgtcgagagctggaagccgctgatccgactcgtcggccactcatcaggtgcgtcatgatggtccagctggtccttgctaccattcgagctgacctgtcttttgcccggacgcagacgtcgtcgacctcgcctggtcgcccgacgacagcctgctcgcctcggttggcctcgactcgaccatcatcgtctggtgcacgcggaccttccggatggtcgccaaaattgagggccaccagggctttgtaaaaggcgtctgctgggatcccgtcggcgagtttctcgcaacccaggttcgtcgccgcgcccacgctatgatggccctctgatgcgtccggctgacgctccaccgtctctgcgatgacatcccagagcgacgacaagacggtcaagatctggcggacggccgactgggggctcgacaagacggtctctgagccgttcaagtcgtcgcccgggtcgaccttcttccgccggttgtcgtgcgtccctccgcacagccgcgcacgagccgccgaagcttgctgaccagcgctttttcaatctcaaccagttggagtcccgacggagccttcatcgcgagctcgaacgccatgaataaagccgtcttcacggcggcgctgatcgaacgggccggctacaagcaagacgtctcctttgtcggccacagtgacacggtcgaggtcacggtgcgtcctcgcgcgcattacaagctgatgccaaacgcccggaagctgacttgagcttccctcgctctacaggccttcaatccctgcatcctccatccggcaagcaagccgtcgcgcaaaaacgtgacgtgcctgctggcgctgggctccgacgaccggtccatctcgctttggggcaacaagtcgcgcaagccgctcgttgtcgtcaaggaaatctttgacggccgcatctgggacctgagctggacgcgcgacggcaagacgctttgggcctgcagcgctgacgggaccgtcgtcagcctcgcctttgaagagggcgaggtcgagggtttcgcgaaggagggcgtgctgcaggtgcggctcagtcgaccgcgcgatttcatcttggccggaactgacctcctcttgtctccgtccgtcttactctcatctcgtaggccgtccttgaaacctatccggtctacaaggcccggctctcaggctccaacccggcctcgaccggtgctctggtaactccgatattctcgcaggcgccgcttccagtctcgtcctctatgctgccgtcgccggcatcgtcttctgcaggaccgagcgtgcccccgctccgaccgggccaggcgccgccggtgacgcagcttgctccagtcaagctcgggccggcggccgtccagcacatctcgaccgcacggaacggcaagaagcggatccggccgaccaacgtcggcggaaacacgtctgcctcgggccttcagtcagtgcaaggctcttttggcggggcgggaccgtttggcggccgagtgccgggcgagcccgagcccaaggtcatccgcatcgacgcgagcggcaacaagatgccgccgccggcagcgatcgtcgctcagtcggcggtccctacgcgcctccagccggcaccggcggcaccgtctcaccgcatctccacgagctcgtccgactcgctggacgtcgacgacgcggccgagctcaacggccggcctgcactccaccggcaagagtcagctgaagcgacgtggacggtcgactcgcgtccgtcctcccacgagtcgtcgaccaccgcagccggcaagcgcaaagcgaccgacgagggcggcatgtctgcgccttctcctgcgcccgcagtgagcggatcgcgcgtcaagggcaggaccctcggcgagggcatccgtcggacgtcaggcgtcgagcgcgagcttcgacctgcaggcgtggagagcgtggctggcggcaacgtcgttcatctcggaagtgggacccttctgagcgcagacgtcctccggcgactcagcgttcgcagcgtgctcaaggctgaggctgccgatgatggcggcgactggatcgaggctcgcaactcgctcagcggtgggtccctgcctgaccgaatcgcgccgcacgcagagtctagcgctgacttctcattctcgcccgtaggcccggccgaggtcatccatcacaccccatcgcaggtgtcttggctcgactatctgccggcacccgtcgtcgccctcgtcttttcgtcccttttctcggcctttgcgtgcgacgacaactcgctcagcatctactcgccgaccggccggcggctcgtgccgatgcttatcctcgatggcccggccgtcgtcatgaacggcaacggcaagggcggcctctcgatcgtcaccagtcgcggcacgctctactcgtggtacgtggctgtgtgctagctgcggcagccgacctgagctgacagcagctaccggcctttgcaggaacatgcgcctccggacctcgacgctgcctgcggccactgcggcgcccaacgtcgggcacctgctctccgttcccgggacggcgatccaccattcgctgcttcggccgaacgggacgactgtgcttgtactcacgtctggcctcgccgtcgcctggtcgccatctctcggcgcctggtctgtcctctcgaatcgatggcacagcgccggctcgtccttctgggacctctccggccgtgttcggtcgtcaaccgctgccagcggccggggcatcgtcgccgcggtcgagtcgtcgctcaacgagctgcctgcgccgttcgacgtccctgaccgcgaggcagcgcccgagtggtgggagtcggcgctctcgctcggccaccttgagggccggctccaggcgtccgtcgcgctcggtgcgagcggcgatgagtaccggcgcttccttcggagctacgccgagaagattgccgacgaaggcttccgggcgaaaggcgaggagctcatccgcgacctcgtcggccctaccgtcgctcagcagtcagtcctagatacaatttgcctgctgtaattcgcgcggcttgcgagcgcattgacgctgacttggcttccttcttcacctgcagcccctcgctcgttgcctcaatgacgcggccgccgctgagcgaggtttcgccgatgatccttggcgtctcgcgccgtgacctgctcaaagatgtcctcgccctcttcggcacgtccgttcccattgctttcttgctctgcctctcacctgctgacttcttgccttctgcagtcaagagccggcacctcgtcaaactcggcatggactggcaagagattgtgcggcgggccgttggggccgaacgcgagcgagcagaggagtaggctgctcgtcggctcagccgcgtctgttgcgtcgtaaaggcgctcggccttggacgaaacgattgtcgatttgagcttgcatctgatcgcgctatcactaggcagagagtaaaggacaggcgtcatgcacaggccgtcgacaggcgtctcggaggtcgcatgcgctgaccttgggcagtaagctggcaggtccaagcaagggcgtctcatagatctgccttagcgggccttctgccccgtctcgtcagacctcgtcaaaccgagcttgtcgtcgtcgatgaaggtcaggccaaccgtctggagcttgcgcgccatggtcgcgagacccgtgacgctgcgcgatgcatgtgtcgcaaacgagatgtagccgcccttgtggataacgccgcccttacgcaggcgggggagcctcgcgggatgcagctgcgcaacgcggtcgacgtcgtcgacgaagtgctggacggcgagcgtcgcatcgaagcccgcgtcggccgtcgtgcttgagccggaagggttgtcgtccgacgcgtcaatgttgccctgcagctgagccaaagtgccccgctgcggagggaggacaaagtgaatctcaggctcgattgaggccgacatggccattgtgccgaaagcatcgcggccaggcgttgacatggggtaacgctggagtggcgtgaaacattgtcggatgccagtccagggtcgggcagcgggaggggaccgaagatgaaggtttcgagcagcggctgggcctcgtcaaggaccggccggctatcatgccagcacagcatgagatatttgccgtgcgaaggaacgtcgagcgtgtccgcctcgatctcacgcaggcccgcccgaggagccttgacgacaagcgtgtcggcaaagaggcaggtggaaagtgacgcccttgaggcttggtactcggccgcgtcgcaaaagttgaagacggcctcgtccagccgagcggggagatcttcgagaagagtctcgaaaaggacgtcatgcccgacgccgacgccgtggtcgtaggagcgcttgaggttgctgaggtcgaaccagatgccgatccgacgcgtcaaggtggccgacacgagcagatggacgctcaaaaactcgagcttgggccgaaagttgccaaccttctcgcagtcccagagtcaaatgaaccaagtgaggttctcgacgtgctggagatttggaaactgggcgaggcagaggagaaagtccgggcagacctcgtcctcgtgccactcgttgccagcctgcgccggaaagacaatgcgcttaacgagcttgccgagctgcgggtagtccgacaccgcctcgaagagcgtgttcgtgcgttcgctgagactgccaacatcgatggtcgcgtagagcagctcccgtgcaacggtctgcggaaggtgatcagttcgggccgagcgtcagcttgatggatgaaagaagtgatggatgaaaggaagccaaagaaagctggtggttcaggcgactgacgttccagccagtcgagacgaggctggccgcgaacaggaactggcgctcgtccttgtcgtcctcctcgtcacggcagatcgcgacggcttcggccaggatctggctctagatctcgaaaaaaatggacacaggggcggacctgcgaattagaggatgccgttgacagccagcgaagggacgttcgcgtccgcaccggttaccgccctatgcgtgaatggaggagagactcacatgttgaaggcgactgagctcgagtgaggggggagcgatgcttgcgcaagtgacagtctgaagacaagaaaggggcggcaaggccgtcagcgctcagagacgagccgccgtcagagcttcgccgttcgagcgacgtacgatggctttcggaggagatgcaaaagatgacctatcgaggaacgtgctgtgtcgagctcgagcttcggggcaggtgaggcggtcgtgatgatggtcagagcgacgaggcgagctgcaggcaggcggccgaccggcaaaacgccctgccgtcgccccttttctggcctcttgtccgcaggaatctccgccgccgcaatcatcctcggccacgagcgccacagcgagcaagcccctcacaagaggcttctctctcctctacaccgcagtcactgactgcctgcccaccgtacagcctcggccacgcttgctgtccctcggacatggccgcagcacatcaaggcgaaagcccgacacccggcccaagctgggtttactactcgatttcgagccgccctgcccgacgtttcgaccggaaccctgacgcacagctgctcgcctcctactcaccaacccctgccgcaccatctattaacctagcacaccatgggtgcgttatctgtttcatcctgcgcgtttgaacttcgagggcgaggaatgctcggctgacgcccgcaccctgcacgctctcccgggcaatccttcccgtgggcgctcccgcagccaaggtccgttcgtccctgagatcaagctaggccgcacgtcgtgtggatacgagcacgcctcggctgactgtccataccttactacagagcaaagcccagggccgcatgaataaggtgtgtcgagcgaggtcgaggcatcctggctgcgctcgcggacgagctgacctcggccctcgcccgcagacctctaagcccgagagcaccgagcctagcctggccatcgctccggccaaaaaaacaaaggagtcaaagcgggtgacgcgcgagctcgccgaggaggccgctgccgccaacccggcacccacgtcggctgccggtggcgaggacgcgtctgctgtcgttccggttgtgggtagcgcggaggccgctgcgcccgcacctaccgccgacgccgagaagaagacggagaagaagcgcaaggctgcgcccgaggcggaggagggagcattaaagccggccgagggcaagaaggccaagaaggctgagggcaagaaggccgaggccaagaagccagagccagtcgccgagccgtcggtcaagatcaagaagcgcaagccaacgggtgagccgtcgctctcgcacctgacttcatctgatgcgcggtgctgacgtgctgctcccatagacccttacacgctcgaggagattcctgtccaggctcagcgaggtgcgttccttaacccggtcgctcgccggcgactccatcgctgacccttgccctgctactctgttcttcacagcaatccagtacgcccagacgctcggctcgcccgacttcaagttcaacaagggccgtcagaactggttgatgcgcaacgtctactcggcgagcgaggtgcgtgagccgggttccgagtcaggatctcgccgctgactcataccactgcgccctccctgctcgtgcaggtcccggaagagtttgtcgaggatgccctgcgctacctgcggagcgtcatgggcggctcgcgcgacgtgagttgttgcgtctcattctggggcgagagacgaggctgatcgtctcgtcccgcctcgcaggtcatggtcaaggctgcccgcgagctcctcgctcgtgagattccggcgccggccgtagctgctgccgaggtggagagccaggaggccgcgccgacggacgaggcacccaaggctgaggctgcggagggcgacgacgagaccgaggaggagatgcaggcgaggctgctcaagacgggcaaggagcgggccgagcggctgctcaagtcgctcggcgtccctctctcatgagcatggcaattagcttgaaatggaggagtgagcgtcagcaacagtgtaccgcagcgactgctaccagctaccgtcagcgccgcttccgagttgtaggtcgtgcgacctgcgcgaaagtgagggctgcttgctgcgcggtcagtcgagcacttgtcagtcaaccgagagcttcgcttttcacccttcaaccgaccacctctcactcaaagcacgcgccagctagcacgccatggccgtctctgagtctggctccccgtcctcagagagtgacggccgcaagtgccgcaccgctcgtccgacgcgtgaagcagccctcggccggagaacttcgtcgcgggcctcctcccgagctcgggatgacagcctcgagccggccgatggcagtcccgacgaccggcgccacacgctcagtacgctcttcatgtccgaggccgaggagcggctgctctcgtcgagcagcggcgacagcgaggagagctcgtccgatgcgtcgacggccgtctcctcggacgacgacgacggcagctcggacgcgtcttcgagctcgtacggctcctcgagctctcatgcctcgacgcactcatcggcagcttccttcacctcctccaagtcctctaacgttcgcttgagacggtcttccgtctctgctgccgagccgctctcgtgcgcttcaattgcgcccgccgtctccgcgaggccgacctcgacctcctcgtccgcggccgcgacaaccccaagccgccggtcgccgaccaagcggcggcacgtctttgactcgccccagtaccgcgccgacgccttcttcgatccggaaaatgtcgccattgtccgctcgtcgaccaagacggccacgtcgttaacaggcctgcctgtggccgacggctcaaactcgacactcgtcgccgctgcgcacgcttctgtcgtcgccgccgttgccggaccgcaactcaagctgccgctccctcccgtctgcctctcggagctcatcgcagcgtcgacacctccgtcgacgccgcgcaagacgccgcgaagggcgaggccgaggccgacagagacgtgggactttatatcgcgctcgccgcacccgttcgcgtcagcggcttcgtccagcacctcggcggtcgcgacgcctatcgcggctgggtccatagcgatcgccgactcgtaccctgcgaggccagcatcgtcgtctttgcgcacgacatctccgccatcgtcacccgacttccctccggcgtcgctcattcggcccactgggtccgctcggctctcgcagccgccaaagctcaaacaggagcccaacagccgaaccgagcgacgcaagagcggcaattgcttctcagcgcttccttcctccttgcaaccggacgaaattgatgtgatcgagctcacgagcgagagcgagatggtgacgccagtcggtcggccggctatcactgggaagggtcggccccttagcaagcggcgcatcgtcctgtcggaatctgaggacgacgacacggatgagcaatcggccggcacgctcgctcgggctgaggccatcgcttctcggcggctgtcgtccgctcctgcccctgctcgggcaccggccgaggtcatcgagctctcaatttcggacgaagagccaccgagcccgcccatccgaaggccgccgccgccgttgctcacagagacggccctccgggacgacgaggacgatgacgtcgtgcccgagacggacgacgaggacgcgggcgtcctttactggagcccgccgccgcctcctcgaccgaacgccacaaagcctgtgacgccggcggcgcgcaagaaggcgcagcctctccaggccatcttccgtcagccggccgtcggggtcgaccttgacgtttacgactcgccgccctcatcgcctgtccgcccctccgccaaaacgccagccaagaaggcgcccaagccgaagaccgcgtcttcagggacggcaccgccaaacgtcaattcgaaattgtggaagacgcggcgcgagatgcttgcgctcggcctgatccgcgagctcgacgcgtccgtatttgaccacctcgttttacccacgcttcatcttgccgagtcgagcgcgagcgcggctgcctctgcggcgaagggcaagggcaaggaggcgttgccgcagggcgtcaactggacgggccggctcaagtcgaccgcgggcatgagccgctggacgcggcgtatggtcggcggcgtctgggaacatcactgctgtatcgagctgtcgtccaaggtcagtctcgagcgagggcggggttcatgctgagggttgagactgacttgcgccggtcgctcgcttataggtgcttgactcggaggagaagatcctgagcacaaccgcgcacgagatggtgcgcttccctcattctcttgggcgcgtccttctcgctgctgatgcatcgcgacatgctttgcgtcctgcagtgccacctggccgtctggatccaccacggcaaggacgctgcgccgcatggcaaagagtttcgcgcctggggaaagcgtgtcatgcgcgcccggccggatattgaggtcaatgtgcgctcccttccttttttcccttgctgactttcgcgcgccgatgggctgacgagatactcttctgatggattggtagacaaagcacgactatgagattgtccgcaagtttacatggcgctgcacgaactgcccggcaacgtacggccgcgacaccaagtcgatcgacgtccgtccctccttctccctcgatccttactgctggaagagagacactgacgtttgcgccctctgttctgaccaggttgagcgtcatgcctgtggccgatgctcaaaccggctcgttgcggactttgcgacggcggcgacgccggccaagccaaatgcctaccagcgtgtgtcctcgcgcagacccttccgtctcgaacaccgtctactctcaagcctgtcgctgacccgcttcatcttcctccgtcctaattgctcgcgccgccagacttcatcaagacgcactttacagccgtccgagcggcctgcccggccgggtcgagcgcggccgacgtcatgcgcgagctcggcgtccggtaccgagcggagaaggcggctgcaggggcgcaggtcgacaggctggctgcgggtgttggaggacttgtgctcatctgaggagcgtggctttgcgctttcgttgggcggtgtggtcgctgatcgcatgcgagagccgtctgttgtcgaggcggagtcggacgccgagggcgcgtcgacggaagctgagcagccgtcggcttgctgtcgagcggcatcaggtattgctgatgctcgtgatggcttctgaggacgacttgctgtcgtccgcctctctccgcttagagcacttatgccaaggatgaccagaccaggctgcgggactacgatagacgagaggcgaacagggcgagaaggggcgatgacgaggaagcttgctgtttggcgcctttggccgtgacgttgcgggcgacgctctcttcgcccgcccgcctcctccgttgctctcttgctctctctccgacctcgcatctccccaccccaccaaattctcgcccctccttcgcaccggccagcgctccttcttacccaggtcgactacctctctcgcgcgcgcggctacctcccaacccgtcgactctgcccgcgatgcccgtcatcgatgccttcaagagtacgtcagcccttccctcgctcgcttcgtcttccgcctttcagcccacgcgcccgcactagagcggagagaagagcaggtactggtcgccagaatccctgtccgaccgggctcgcctatcctctctgtgcctgggaggagggcctcgctaggagacgcggcgtctcgtcgtttgcgtctcgcccgggcgccgtcttccagcccgctcaaccaaacccacctgctgacgcatccgtacgccctcctaccttcctacctctccccttttccctcctctcagacctaatgcgcaagcaccccaaagacggcgcctcgacctcaggctcggcacccaactcgccccaacagccgacaggctttgcacctgcgccggcgtcgcagtcccagcagcagcagcagcagcagacgtcatccgctacgcgccatcaccagcaagcggtccagcaggctcaacagcaggcccagcagcagcaggtccaacagcagcagcagacctactctgcccgggaccacgcgacccaccccgctcacgcccatgcgccccttcccggccaacaccagcagcaacagcaggctcagcagcagcagcagcagggccagggctaccaggcgtacccctatggcggcccgcaggccgagtacgacacggccaacggcaagaaagagcgcctgcccgtctatcaggggcttgaggcgttccagctcgtcgagaagatgggcgagtgcgtcgccttccctcctttttcacctttccgtccgctggtgatccacagggctgacgctctgactctttctcctctcctcctgcagcggcgccttttcaaacgtctacaaggcgattgaccgcatgaccggcctcaaggtcgccgtcaaggtcgtccgcaagtatgaacttaactcgtcccaggtacgcgcgccctcttccttccgctccttctttgctccttctcctccttccgtcttgaaccacgaggattcctcgctcgctcgcacgaacgcggccttgcacagcgagtgcttgtacgtcgcagcttgcggcgctgagacgagcaacgctcgctctcgacggtagtctgagccctgctagcctgcaagctgggcgaaacgactaggcggggagcctggggacggcaccgtgatggcaggagtaacttgcgcgctgggaagcatgaggcggtcgattgcgctcttgcgacaaagggcacggcccgtcacctcgcccccgtctgccacccctctccgaaggtcctctctggagtcgtacatgctgacgctccacgccctccttcctacctcgcctccctctcttcttccttgcctcctttctgctgcgctcgcgaacacgacagcacggcgacaagcacctgaacccgaactttaagaagcgcccgcgcgtgaccgaggtccgctttcccttcccttgcctcgccttttctctgatgcctccttagcctgccctttctccccttgtctcgtctcggcttgctgacattccatcactttcttctcgcagcgcgcaaacatcctgaaggaggttcagattatgcgcgggaccgaccacccgagcatcatcaagctcatctcgttcagcgagagcgccgagcactacttcctcgtcctcgagcgtacgtcgtccttcgcttcgtgccccaatctggagagcctgcggcggctgacaactgtttctctcgtcgtcgacacagtcatggagggcggcgagctcttccaccagatcgtcaagctcacctacttttcagagcagctctcgcggcacgtcatcctccaggttgcgcacggcatccgctacctgcacgaggagcggggcgtcgtccaccgtgacatcaagcccgaaaacatcctctttgagcgcctgccgatcgtcccttctcgaacgccggttcaccggcagtatgacgaggaaaaggaggatgagggcgagtttgcgcccggtgttggaggcggcgggattggccgcgtcaagattgccgactttgggctgagcaagattgtctgggccgaggacacggcaacaccgtgcggcaccgtcggctacaccgcgcccgagattgtcaaggacgagcggtactcgaagagtgtcgacatgtgggcgctcggctgtgtgctctacacgcttctctgcggcttcccgtgcgtgctggtcgagccaatccgtctcttatgaccttcaactgacgagacgccgctttcatccaggccgttctacgacgagtcaatcgctgtcctgaccgagaaggtcgcccggggctactacaccttcctctcgccctggtgggacgagatctcggcctcggccaaggacctcatcacccaccttctctgcgtcgacccggcgcagcgctacacgatcgacgaattcctcgcgcacccatggtgcaacgagcagccgccgccgcagtcggtcgcccaggcgtacgctcagcccgcccagcagcagcagcaggagaagccagcgcggtcggtccctgccaacgcaccgatggactcgcccctgctcgcttcgatgcgcggccccggcgcgcgcgagggccggtcgcccggcctcgcctcgctcaaagaggcgttcgacgtcgccaactcggtccaccgaatggaggaggagggtgcgcggcgccgggcgtacaacgggcccggcggtgcgggcccggccggcttccttcaggggctgaacgaggacgacgaggaggctgaggaagagggccaggtcgaggaggtccggctcaagcacggcgacgcggccgcgcaaggccttcagcagcgccagcagcagcaggcgacgtcaaacagcgccgcgacccggacgcagcagcagcagcaataccaccgcgacaacaacacggcgaccggcagcgccaacgccaacgctaacaagggcggctatcagccggccggcggtgccgaccgaaagatggctgaggccgccctgtacgacggccgggctggccagcgggatcgtggaaagcagggccgcgccggcggctttgagctcgacatgagcggcgccacccttcgtgcgttccttctttccttccctcccgctgaaaacgcccgactgacatctcttccctctctcgcagtcggcaagcgcgcaaagaagccgagtccgctcgccaacgacggccttgtcccgccctcgagtccggcccggcacacccaggcgccgaacgatgtcggctcgcccatgcgctactaatacccccgccctcattgtccgacacgcatctccccctcatcccaacctatccgcccctctaggcttcacgacccttgcatacccccgttttccgtccgtctccctcgtcacgtacttttactccgactcaccatcttcacacgcccctccaccccccggggtggcgcggaggagagagcgtttacgggactaggctacaacagggcacgagaagggaggcaacagacagaggtcgcgcgagaaaggggtggcgattacgtgggggtcgtcaagtcgatcgtaaaggagaggcggtcgtgaggagggcggcagtagagaaggcttcagacgccttcgacgtagacggcgggcgggaggttgctgccggcctggacggcatagtaggctgtcacggccgagggaccggcgaccatgcacgccgtcagggtgtcaccgagcgtgcgcctgtcgggtgagggggcaacagcgtcagcaacggaggcaggaagtatgacagttgactcggactgaccgcatctcggcgcccgtcccgggcgtaacgcggtgggcggcgaggatagcagcaatctcgaccgtatcgcgctcagcagcagcgcccgaccggccgcggccgataaacagcataaagctctcgcgccggccctcggccgcccgagcgacgtcggacaccttgcggctgatcgcgccgagcggtccgcctgtggccggcgtcgcagactcggtcgagaggacgagccgccggctgagctcgccgtcgtgctgtgcgcgggcgctgaagaacgcccaagccttctcatcgtcgtcgtccgaggcaatcttgctttggacgttcgcaaaggcggtgttctggtggcggcggaggcagaggcagtggtcagcaagggcgccttcatcgaaagatgacgctcttccaacgcaccgagcgcccgatcgtctgctggctctccatgagcgccgccgagtgaagcttgacgtcggccgggtcggccgtcgacgacgtcaggacggtcgacagcggcccgccctggccactcgtgctcgggctagcgccggcaggcaagacgcggacgacgatcgccgtcacgcgcgggttaaggcaggcctgggcggcaagcgagagcgcaagccgatcgtcggcgccgccccggaaagggacaaagacgtgaacaccattctgatgggcgaggggctccatcaggttggtgccgcggtgaatgaagaggccgacctgccgaagcgagagaggtggcagacggtcagtcttctgaagacgcaggaggaggtcccgtgtggcgagggacgcacatcgcgcggcgactcagcaaagacgcggcggacaaaattcttggtgtacgggtgggcagccgagtcggccgcaaacagaacctcggccaggttgggcgaggcggcagcagccgtcgtcgtcgtcgcggccggcattgccccgccctcgtcgtcggccgggagtgaagacgagccgacggtccagggtaggatgatcatctcggtcccttccgagtggctgacgatgctcgtcgggtacgagtcttgtgggacgatcgcaatcgccggctggacggcaatttggttcaggtttccgaactgccaggacgagcagatgcaatcagccagcagctcgaagggacaggcagccaaagaggtagaggccgcaccgtcttgaagatctgcatggccgtgtcgcgggcgaggatcgtctccgagtcggcgacgcgcatgacggcactcatccggcccgagagctccatctgcgcgggcaagggaagggtagcgtcagcctcgagagctcggggagaagggcgatgaggccacgcacgagacgcagtgcgtcgacgctgatagccgcgagctcgggctcgttcgacccggctgccgaggtcgtcccgctgcccttctcgagcgtgtccttctcgtcggtctggctgacggcggccgacgtcgtcggcgcagccgggccaagccggggctggaagagcttgaggagcgtcatgacggccgggacctgctccatccgcatgaggacgaccgagtagcggagcgtcgagagccggacgccggcagacgaaatgtcggcgagcgagcttgcgaatcgcgcatggaggccgagtcggttccggccgtcgacggtgccgtccgtgatcccgccggcgccggcgcctgaggcggtcgagagcgtccggtgccgccggcgctgcgagatgatgtgccggacccggggcgggtagcaccagagcgtgagcggcgtcgtgatgatggtgaggacgatggccattagtacgaagcagctgaaggcgcgcggggtcaggatgccagccgacaagcctgcgcgaacgcaagggatgggaggtcagcgggaagaaagctagtcgagagcgggcgcgctttgctacgcaccgacattgaggacgatgagctcgaccaggcccttgcagctcatgagcgtcccgatcgcgaggctctcacgcgggttgaaaccctggagccgggcagcgatggcgcagccgccaaacttgccgacgaacgcaacgacgcagaggagaatgacgtagccccacgtcttgccgtcgtcgagcaggccgaggttggtcttgaggccggagactgggagggggtaggattgtcaactggtgcagcggccgacggtcaagccgagggacggacgggtaaagtagattggcaagaagaggacggtgacgaggtcctcgatcttaatgaccatgtcgagcgcgacctcgcgagggatggcaaacgcggcaacaaagccgccgaaaattgcgtggacgccaatgatgtcggtcacgaaggccgaggcaaagacgaggaagagggtcgtcgtcctgggcggcggcagaggcaggaggagaagtcagtcgcatgcgcacgatagcgcagcgtcgaggaggggcgcacatcatgaagggcgagggcttgccggcctcgatcgagccggtccggattgcgagccagcgcatggccatccggatcgggtagacgagcgtctggcagagtaaaagcaagggtcagcaaagagggaagatgctgcgagataaagcggcagaccgaccagcacccagccgacggcacagagcaaaatgtagacggccgtgacgcccgtgccctcgccacccgcggacgagttgacgagcgcgacggtgagggcgagcaggatccagccgacgacgtcgttgccgacgcctgccgagaggacgacgacgccgacggtcgtctcgagcagcttgagctcggtcaggatccggcagaggaccgggaaggccgtgatcgacatggccgtgcctggcgcaaaggtgagggtcaacatggtcagacggggcttggaccaggcgcgcgacaggagcggctcaccggtgaagagcataaagtggccaaagttgacagtcgagggtataaactcgtgataaatcgggacggcgatctgagcgagagtaagaggtcagcaaaggcaaaagaggggtcggcattgcgcgaggacgcacggccgcgccaaggccaaacggcaggatcatgccggcgagggcgatgatggttgactcgcgggcgttgcgcttgataacgccgatgtcaacctcaagcccgacgaggaagaggaacaggacgagacctggaggcaggccgaggcgggaggcgagtcaggtcagaatagcgtttgggcccggtcggcgctgggagaagggtggcgcggcgcagtcgcccagaagggagagggcagacgcaccgatcgtcgagacgaggtttaggtatgagaggctcgccgtcgggaagatgctgtcagggtgaggagagagccgtcagactccctatcgcaccgacaggagagggagggggcgggtcaggggggcacacacctctcggtgaagccggggacgcggccgaggacggtcggcccgaggacgatgccggcgatgacctcggcaatgacctttggctggcggatgcgggcaaagccaagggcgaggacgttggtaaagacgaggatgagcgagagctggatgatgaagagcgtgatcgggttggcggcgttgaactcggcagggttgaggccggagaggacgcctgcgaagggcgggagcaacgtcagcgtcgtccgctcgtgctgaggctcgcacacgcgctgaggagagacgtacctgcctggccctgagtgaccttagcggcccgggcgacgagcctgtggacgacgtcggcggcggcggcggccatcgttgacgcagaggggagcgggagggagggaagggggctcgagggaggcgacggccggctgcgggccggtgcggagggaggacccgtgtgtacgagctcgtgagggagcgcgatggaaagcgagtggcgaggatgtggacgagcggctggcaggctcttcagtcgaactgggaagggaggggagggagaaggaggtggtcaaaggcaaggaggcaggcagactcctgttgctgcgaggctggctccaaagggccaagcccggcgagcccgatcgcccttccttttttatgtttttctcgaaaccccctctctgcgggcgaccggccgaagccgaaggctgcccctcgcgtgcaaccctggtcctccttgcccctctcgtctctccttgtttaggctgaggatggcctttcgcacacgaccacgacgactctgacgcaatggacgacaagccggtcgctctcacaatcctgacctctcctccggctaccaagctgccaaccgacagccccccgccctccgatccgacaccctcgtcgtcgccgttgactgctgcggcccggtcggtcgacttcgacggcgaggacgagctcggaaagaaggccatcggccgggctgatagcgacgaggacaagccagccgtcgcctctggtggccgctggcggctcaggaatctcgacgacggcggcgctggcaaggcgaccgacgaggagccttcacgccgccgccgccgacggacctggctcgaccgcctcttgcgtagacatcgaccgccgccgccggccgctccggcctcactcgacgatgcggacctgacgccgctcgcgacggcctcgttcctctcgctcttgaccttcagctggataacgccgatgatggacctcggctaccggcgcacgctccaggcgaccgagtgtgtcttcctgcgcaagccctcctcctcctcctcgagccaccactgacacgtccttgcgttgcagcctctggaagatggacccttcgcgcgagtctggcccgctcgccaactcgctcctcgcagcgttcgcccgtcggcaagccgatgccgaggccttcaacgtccggctcgatgcaggcgaggtcaacccgccgctcctgacgcgcgtcagatggctcttcgccggccgggccggacgggagacgcgcgagacggcctggcggtctggaaaaggacggaggaaggcctcgcttgcgtggtgcttgaatgaggacgtcgcgctgttcttctggaccggaggtgcgtcgtcgcctgtctgcgtgcgcgtcgtcgcctgtacacgtgcgacaaccggcaaggaggacctctctgattcgcctgctcgacgaccctcatcaggtcttttcaaggtcgccggcgacaccgcccagctctgcggcccgctcgtcacccgccaaatcatcctctttgcccaagtcagagcccgagcgcgagaagacccaaccaacgccgtgcccgagccccacatcggccgcggcgtcggcatggcgtttggcctcttgctcctgacgatcgtcgctagcgtctgccagcaccaattcttctggcggtcaatgagcgtaggcgtgttggcgagggcgcgcttgacggccgccatctttgacatctgtccgtgtctcgctgctgcttgttgcctgcgctcgctcagtctgacaaaggcctgcgctcacctcgcttgcataccctccagcgatccacctgacgcagaaggaacggacgcacctctcgaacggcaaactcctcgcccacctctcgaccgacgtcagccgcgtcgacttttgcgcccagtggctgcatgccgtctggacggcgccgatccagcttgtcatcagtgagtgctagacgggcggcacgatcagccttcgcacaacgactggctgcgtgagcgttcttcgcacagcgactgaccgtggttcttgccctgcctcgctcagcgacgatcctcctcgtccttcagatcggcccctcggccctcgtcggcatctcgctcttcctcctcctcacccccgtccagacgcgcatcatgggcatgcagttccaagtccgcaagcggtcgatgcgatttacagacggccgctcgcgcctcctccaggagcttctcggatcgtttgcgattgtgaagtatttcacgttagagcggccgttcctcgagaggattggcagcatccgctcgagcgagctccagggcatccggtcgatcttgctcatcaaggcggcaaaccagagcatcgccatgtcgctggtgagctgcgctgctacgactgtgcctcgtctcgacctcacgttgacgtgcggcgcttgccctgctaccgtagcccaccctcgcggccgtcgtttctttcctctgctacgccggtctcgggaacgacctgtatgtcgcctctcgcgcatacaaccaagccgtgctcgctgatcccgttgcccgcgcccgcagcgacccggcctcgatctttactgcgctctccctcttccagcttttacgccagccactcatgttcctcccccgcgcgctaagcgcgattgccgacgcccagaacgcgctcgagcggctgacggttgtctttgaggccgagacgctcgccgtcgccaatgcggtcgacccggcgcttgacgttggcatccgcgttgcgaatggctcgttcgagtggctcgctgcgccgcccgaggaggaaagcgcggcaaagggcgaccgtaaagcgaggaagaaggccaagcagcaggccgccgccgctccggccgtcagcgaagagaaggcgtcggtggagcctgccatcgagcccttccgggtccaggggatcaacatggaggtcaagcgcggggcgatcaccgtcctcgccggccgggtcggcagcggcaagagcagcatcctgcagggcctgatcggcgacatgaagaagattgagggcaaggtgtacgtctgccggccgagcccgaggtctggcctccgtgtcacctgactgatggcctcgctcccccccccccttctactccagtgagtttggcggccgcgtcgcttactgctcgcagacggccttcatccaaaacgtccgtcctcgtcgcctcttcgttattcgccgcccccgcggctggtgctgacgacaataacctcatccaggcatccctgcgcgaaaacgtcctgtttggccggccgtacgaggcggagcgctattggcagtgcatggccgacgcctgcctgattgctgactgccttaccctgcccgatgccgacctgaccgagatcggcgagaagggcgtcaacctctcgggcgggcagaaacagcgcgtcaacattgcgtgcgtccgcttctgctgtcctctccgtggtcgactgatgctgacgtgcgtgatcgctgttcgtagtcgggccctctactttgacgccgagatcgtcatcttcgacgacccactctctgctgtcgatgccgccgtctcgcaagccctcttccaggacgccatctgcgctcggctccgaaacgcaaacgtcgccgtcctcctcgtgacgcatgcgctccacatcttgcccgaggttgactacatctactccgtcgaggccggccggatcgtcgaggaggggacttttcccgagctcatgtcggccaagggtgccttctcggagctcgtccgcgagtttggcggcgatcacgtcgacgagaccgaggcggataaggcgctcgcggccgaggcccttgcacgcgacaacaagctgcgccgcgcagaggcggtcggcaagagtgccgcggtttctggcacgggccggctcgagggccgcctgatcgtcgcagagaagcgatacgtcggcaaggtcaaacgccgggtctatgtcgagtatagccgggccggccggggtctcgtaaccttaccgctgctcctcggtgcagccttcctcatgcaagggtgcgtcgaccactcggtgcactactctgacgtaccgctactgaccggccctgctgtgccacgccgcagctgcctcgtcctctcttcggtctggctcacctggtggcagggcgaccactttggcttcagccagggcgagtacatgggcatctacgcgacgctcggcgtctcgcaagccctctttacctgtgagtttcggtcctgcgctcaggtcctccgacgccgccgctgacccgctgccgcctcgtcagtcgctatgggcgcgaccatggctatcatctcgttcaacgcctcgggccgcctgcaccatgccgcagtcagccggctctttttcgccccgctcagcctcttccagagccagcccctcgggcgcttgatgtctgttgtggggaaggactgcgacgtgggtcaagctctctcctcgcgtgcgcaagacgccggtactgacccagcgcgctcgcgtccgtcagaccatcgacaacgtcctcgcagactcgctgcggatggccatcatgacgacggccaacgtcctcggcagcgtcgtcctcatctgcatcttcctgccctacttcctaatcgccgtcgtcgtcctcttattcggctacttctggcttcagtcgttctaccgacgcagcgcgcgcgagatcaagcggatagacgcgctcctccgttcggtcctctactcgcactttagcgaatcgctctctggcctctcgacgatccgcgcctacgacgtcgtcgccgccttcgtcgccgaaaaccggcactacatggatctcgagtcgcgcgctcttcagctgagcgtcgtcgcccagcgctggctcgcgatccgactcgactcgctcggcgccatcctctcgtttgtcgtcggcctcctgtgcgtcatcggcgtcaacggcatcagcccagcccaggtcggactcgtcctctccttctgcatcacccgtgagcaggccccctctcgttcccgctcggatccggctgagacctctccgaccgatcagtcacgcaacagctcgggatggtcaccaggcagacggccgaagtcgagaccaatatgaacgccgtcgagcgcgtcgtccactacaatgacctcgagcaggaggccgcgtacgaggtacctacaaagaaacccccctcctcctggcccaccgacggccaaatcgaatttaacgaggtcgtgatgggtgagttcgtcttgcggcgcgcgtgaggcagcctctcgctgacctggcctggcctcttacagcctaccggccggatctgccgcccgtcctcaaaggcttcagcctcaacgtccgcggcggcgagaagattggcatcgttggacgaaccgggtgcgttcagcgcgatcgggggcactgaggcgtcccttctcgaacactgacacgatacttgcaccccctccagcgccggcaaaagcaccctgatgtcggccctctttcgactagtcgagtgcgttgtaaaggagtcgagctgccgacacccgctgaccccaacgatgctcccactcttcgcaggctgacctcgggctccatctcgattgacggcgtcgacatctcgccgctcggtctctcagacctccggagtgccgtcaccatcatcccgcaaggtgcgctcgtcgcggctcacatgcgtcggatggcttgagctgacctttccctcacagatcctcagctcttcaggtctgttggcttgcgcgtagatgctgcttccatcagctgacgcctctcgtgcttcgcagcgggactgtgcgatccaacctagacccctttttaaggctgagcgacgccgatctctggtcggccctgcgacgagcgcacctcgtcacctcgacccacgacgacggcaagacggcggagaagtttggcctcgactctgacgtcgacgaggacggcgccaacttttcggtcggccagaggagcctcctctcgctcgcccgcgcgctctgcaaggacgccaagattatcgtcctcgacgaggcaacggcctcagtcgatgccgcgtcggacgcgcagatccagcagacgatcgcgagcgagtcagtcgcgaagcctcggtgcacgtcacgtagctctgctgacccagtctctctcgcctcctccaggttcgcggacaagacggtcctgacaatcgcccatcgcttgcggacaatcctgcattgcgaccgcatcctctgcctcgatgccggcgtcatcgccgagctcgggacgccactcgagctatttaggcaagacggcctgttccgcgcgatggcgctcaaatcaaaccttagcgaggccgacttctgcccataggctttttgtatgcttcgctttagatgtcgtctcggtcgagatcattcaggggggcattgccgattgtgacaagaaagatggggaggagaggacacggccgaggaagggaaggaggtctagtccgagaggaagacacggtctaaaagcgccaggggatggaggggcggctgcgcgagccggttgcagatgctccgcttgtagtgcgcggggtcgggcgactggcctggctggtcgacggcaggccaaggccgagaccggcggcagcgccgagcgagcttggtttcgaccgttcgccatcgcctgccttccgcatcagctgaagagggacgagcggcgacgcagggctgccgggaccggctgcaagagagggactctctgggccgggcgagctgacgaggacagtcattgtccgcggcgtagcgaaagtcggggtagccggagcacccgacaccttgcgcgtgcggcggatgctatgatcctcgcgatcgggcgtcgctggaggtggcaagtcgtcgccgataggtgggcctgaggggctgtcggcgatcagaaagagggtctgcgagagtggttgcgacacgacgcgcgagccaggtgttcgggacggcgtcgaagggccgccgccgccgcccgagagcccgcgctcgcccttgcccgggtccgctgggctgagcaccgttgatggcgacgaggtcgggatcatgtccttgaagtggtcgcgcaggaacctgttcggagagtacaggtcagtcagcggcaattctctcgccgaaaccgcctaccatctgacgaccgcagactcacttgctgagctcgacccagccgccgccgacacggaccatgacggtgcgcgagcgcaggatgcggcagtagcacagccttggcggttcgccgatccagtatcggccggcctctgcgtcgctaccctcgtgcgcggcgacgatagggatctccatctgcggtggaaggaagaaaatcttttgggttagcaacgacggtccaagcagaagcaatgctgcacacgcattcaccggcatcgcgttgacaatcttgctgactgcccgatcgagcttgtggcccttttgaggcacatacggccgacgcgagagggatgtactcagcggccgagtccgcgaggaagaacggcgtcgcgtcggcgtcgcgagactgacgtcgcccgttgccgcagcccgaacaacacgttccggcgcgcgatgggcatcaccgctcacgcgaggtcggaaccgacgttctggcgtcggagcctgcgcgccgggcaaggcgtagcggagagctctcggcagagccgatgagctgctgcccgcaggaggactcctgagagcggtcggtgagagaaagtcggcaggctgcgaactgagtcgcagacgactcggtgtggcgacgtggccgtccgggcccgcgctcgaaacggcccgcggtcgagtctgaccccttggcgggcctgccggaagacgcgaaggctgcgaccccggcagcgggctgcgggatgggccagagaccaagcgaggcgactgagtccgggcgggattggttgaggttggcagacgaggtcggcctgaagatgcgaggccgaagatcttggtcggcgtcttgacatcaggcgcgatggaaccgacggccgctgtaggagataaagtggagggcgacgatgacgggcgcgaggccgaggccggtcgggcgggacgtccgttgctggcggtcgtctcgcacaggaacgagatctggccgccgtcgatgtcggcctcagacgagccagtttcagacgctaggctcgaggcgaccgatgtgcttcgactgcaagcgcgcgacggatgtagtgccgtcgatgccatctcggccatctcatcggccgcccgttggaggcgcgaaacttcgacttgggctcgcgcttggtctggaaggagggcagcagcctcgaccaggctgttgaacgcagtagtcaagcgctgcagaccttcgtcaaggttgtcccgacgcgtggcggacgacaggctggcgacatgtggcttgtcgcgaacggcatcgaccagattgaggaccgcagagagctctgcgtcgaccgcctcgacggccttgtcgaaggaggagacctgcgaccgccgaaccgtatcgcgcaggagctcccggccgctgacaagctcggccgcaagggtgttgagatgggccctgacggatgcgtctagtcgagtgaggtcgatggcggtcgcaggagaagtgtcatcgcttgacgtccacaaaacatccggagccgtcgcgccagagggtgttaaaggtgctgcctggccggttggcagcaggtatacgacagccagggcgtctgcgagcgccggcgaggagaccagaggcacgtctcgcgggagggctgtcaggaaggcttcagtctcgctctcgaggcgggcgacctcaggagggatggcgtccaaggtggtgctcgctgccttggctgcccaagtctgtcgcagttgcgtcccctgagcggaaaaccgctcaaccgaccgtcgctgatcgtcgaccgaaggcaggaggcgcgagccgagctcggtgagcgcagcgactgcagaacaaaggtgcgttgtccgaccgtccaggtggtcagtgatggctatatgcgtcctgcgggccacgtcgtcgagagaggccatcggttccgagacgcgtgaggcgagttcgcgtgccaaagcggccagctgctcgtcccagtacgagtcgacgccggcatctgctgagaaggggagtgggggctcatgccaccgctgacgatgaagggcagcgaggagcgagactcggaggccactcaaggaaacaaagacgtcgtcctggccggtcgagatggatcggtaggcgtccagactggagacgagacgctgggcacttgcgagcgccgtctcggccgctagagcgagatcttggagccgcgagctggagccgacgactgctgaccgaaggttggggtccataccagaggccttgacagccatgagcaggaccgcagcctgctgtagcagcggctttgaatgctcaatggcagctggcaccgcgagtgagaggtcggcgagccggttggcgaacagctgatggctctcgggctggaggcaggcgatattcgacaaatcgggcgcgccggcggtcggagagcgagaaagatcaccgagggcgtcgtcgagctcctgggcgaggtcggccatctgcgaccgaaggctgtcgagggtcctgacgcggtctgcgagctggcggtatccagtcgccttttcctccgctagtctggtcgcccgtcgggtggcagtgagctcggcagcgaggaagtcgacgatggcgttcaactggcctgacaggccaggtgaggttgcggcaaacaatcctgaagggatggccagcgccgtcttgtccgacagagtctcgccggcaagagtcgcggccgagaggatctgggcaatcttggcgtcaaagttccgggctcgctcgtcgctcggatgctgcaaggaggcctgcgcaatatccgagacaagggcctccgcctcgacttgcgattttcgcagcgtgtggaagagctggtcggcgctggaacgcggtcgggcgtctgatcagtcaatgacgcaccaagccgatccgcatctcgacgttcggtcgatagacgcacactttccactgacgtgcatgagcgcgagcgaggtcgtcccaagcccggagctgatcgactttgagctcgacggcgtccatttcgtcgaggaaccaatctggcaaagctccaccttcggccttgtcggtggccgggaccgcctcaggagctgcagcggcggcggcaggcggctcgccggcgacctcttcaacggatcgctcgtgcgccacccggacctggtcgcgggctctgatcgtggcagcgacgtcgatcatccggtcgaggactcggcctgcttgcgcaactggtccgtttcggagtgacgagatgcggttctggaatgactggcagtcgaactccatgatctgggtcatgacttgcggtgacggtcacacagggcgtcagtttcggccattcaaaccaaggcagcaagacgagtagctactcacggaagcgctgcgatcgacttgccgtgccatttcctggtccaaagcttcgtgccgatgacatactcttgatggacgcatcgctgccccgccgagtcgcccgagtccggctgacaccgtcagcatgcgactcgtcgtgaccaggcgatccagcaggtggctggcgatatgtgacagcgctccatcggcctctctgctcgacaaagagctcgacgtcgcgtgtgatggcgctgacctcgagggcgatgttcgctcggcgcgagtcccagtcgaagcggagggcgagcaagtcgagcgtatcgccgcggtcgcggagcaagtgaaggagggtgtcgaggagaaacagagtcgagagtgtgatctcgagcaggtcggtgtcagcgcgagacagtgatttggccgatgcagctggtggggagagggcgcaggtcagcgtcggcctcgaccggggaaggctggcgggctgcggagggactactgacctttagccatctggcgcaggcgcgcaatctcgccaccgtcgagcttctcaacctctgcctcaacctgctcgtgctgcttaaacatggcttcgacagcctcggccgtcgggagcgagctctccgcctcgaccggttcgaacgtcgacaggcagccggcgaagcagtcgatcgactcgaggctgcgcagaacgtcgatctgctgctggatccatcgcttcttctcgacgaatgcctggagctcaatcacgtcggtgagcgacagcgcctcgtcctcggtcggtgagggtagcggcagcgagatgcaggccgggtcgatcgacgccgtgtcgacgcgtagcgcgccagggggggcggagggaggcgtcgctggtgcatcaccaaaagcgcccgaggacggcaggaagggcgaggtcgagatgttgacagccgacagaccctttgcgttaaagacgggccggtcgggtgctgaggctggagacgcgtcgtcgaagggacgcgtcgagagccgaatcagctctggtccccggtcgagttcacgggctagctcgctcacctgcagcacctgagctcggcgagtcgacctcggtcgctcgccttgacgtctcgactagggtgtcgccgtcggcctgtgagatatcggtgcgtcgaccggcatcctgcgagtcgccctctccggcgatctcgctcggcccaaacggacccgacttgacgcgcctcaaccggttcagaaaggcagaagtattagccttgatcggagaaggcggtgcctcctttcccatgccgagcgacccctcttacaccggtggagtggggagaggcttggtcccggtcgatgcagctgcggcctgcgagggaaggggggggggggagacgagacggcgactgccaagcggcgggcgatggagggagacccgcctgcgggccacagaatctagaaggttgccgtccgaggatagtaggacatggaccgaaaagagacgagcgagggcaaaagcgagagaaggcttgcgagttggtgacagatcgaagcagcaggtcggcggctcggggctgagactgccgtcgtcgctccggctcggcagcgcagctgcgcccgttagttgcaatgcgtaccgacgtcgacgccactcagtgacgaaggacagcattcgggggcacgagtcatgagacaaacgtctggagcatcatgcgatccgtatgggccctgctgaggcccctcacttggcctcgccgtcccgctgctgctcctcctgcatgctcagctcgatcgccttgcgcatggcctcctcctcgtcctcatcctcgtcgtcctcgccctccgcggcgtccatctcgacatcgtctccagcagcagtagccggctgaccgccagcgaccgactgggcaatcgctgccgccagctcggcgtcctcgtcgtcctggtcggccgttggcggtgccggcgttgctgacggcgccggtgcgggcgcggcaactgacgacgacgacgcttccgggaccgagttcagtgcgggcgccactgagccagaggacgaggcggccgctgcctggcgggcctgctcctcctccatcgacatgcgcaggacctgcagcgtgagaaggtgaggttgcgctccagtcagccctgatgcaagcggatgacgggtcagcgagagatagagcgcgacagaccattgccagctcggggtccatgtccgggtcgacgccaaactcgaagcctcctccaccaccacctccgccgctgccgccgccctcgacgcccatacctccgcctccgcctccaccgccgaagccgtccgagcccatgacctcgctcgagatgatcatgtcggacagcagtcgcggcccgggctggaccgcaaggaaatggctggaaggagacggaagcgaaaggtcagcattagctcgctggccagggcgagctcagactgaagtgcacgcacgagttctcgccagagtgtacgctctcgacgaacttgacgagcgccggctcgttgctctcgccctcggctgcgccggccgcctcactcggctcgctcgcaaacgtgacgacgtcaacggagacattgttcttcttgagcttcttaccgagcttgacgagcgccttttcgtcttggctggccgagagcggcgagccgacgaggatgatgagccgctgccgctgcgtcttgttctgccggtgcttcagcgcgagctgtcaatggaagagcagcgaacggctgtcagtcgtcagatcgagtaggcgcagcggagccgagcagtgaactgacctgagcgatctggatgcccgtgtagaggtccgactcgccgccgatcgaggccttgtgcatggccgacaggatcttgccaaggtcggccgttggtgtagcaaggacctcaggtctgcagggtcgcagacgagagtcagcacggagcgcttcgagcgagccaggtccaaagcatgctcgagctggagctcgactgccgagctgtgcggccgtcgccaagagcctgacaggagccagcgccatgccgagctgatgcagccacgtgcgctcaggcagctgcttcgagaaaggccagagacgacgtaccccttgccgttgaagccgcccatcgtcatgacgccaaccgtgttctcggggttggcattgatctttgcgttgaagaggaccgatacggcgtcctgctgggcctcgaagcctgtgacgcgagacaggtgagaggaggggcgaggcgagcatggtgcagagcaacgaggcaatcggcagaggcatggaggtcaactcggagcaggtcgagcgacggaggtcgagcatgaggcgagctcgcgacggcctcaggtgagggccagaaggggggacgtacgcgtcggtgggaagtcgccgttgcgcatgtactccgaagagtcaatcctgggagtcgtcgagcaaaatgggtcagcaacagggtcgaaagcagctgaaccgacgtagcatcatcgtcggcggaggaacgcacaggagcatcacagcctgtgatgcagctcgggcgatgtcagcgggcaggaacgagcaggaaaatagaatagcaaccagaccgacctcgggtgccatcgtgagagaaaaggaggggaggaaggttgggtgagagagggcggtaaaggaagatggaggcgaggagagagcaaggcggcggcggcggcgccgcttggacgtggaggtggttgcgcaggcgcagtctcaacgggtgtactctctatgcgccggcttgcttgacacaactctatcgccagacaaagctaggccaggcgttcgcacagagtatcgcggcagtcgtcgatttacaaggctggtcattaaatcaggccagacgaatcggggcgcaagggtggccgctcccagggcagaggcacactgacggccctgtcctcaattcagcgttgcctttcgaccgcgaacgtcgaaggagcggtacgcggtcaaggcgctgccttgcggtccgtcgtgcgttttgtcagcctctgcctgccaaccagcggtgtccgggctgacgtcgtgtgccgtcacggcgctgactcccttctcgtctccaccggcgtcgccccctcaagagattcctacgaaccaagcacagctcggcgcccgtgcacgagaccgcccgtatgaccgatcgaccgtacgagcctccaccacccgtcgtcgctctgcagtgaggttgcgatcacagcaattgacttgatgagcaggcctgaattacccgaggtcaacgatttgccgagtcatcaccctcctgcgcagttgatgagcctatccgccagctcgcctgtcagccccgaatccttgtcgctcgcgagatggcggtgcaagagtcgacagaggttcgagcgagtgaccgtcgaatgcggcgagacttgcggctgcaggtcgggtcgacttgcatctgcagtggcacgacctccatcggagcggcggccagcgtgcgcgcgcggcggcggcggcggcggcccttgtccttcagcccgccccctctgccatcaccaccgaccttccctcttcccttctctttcagacccaccttacaactcagccaaaatgtgcgtagggccaaaaggagcgagctccagaccgagctcggctctcggctctctttcagctgcctactcctcgagtgcaagtcccactgacgcctcgccctcgccgccgtccggtttttccctctgcccttcgtcaccccatctcacacccttgctcgcccgccgtgccgccgtcttcgactctcctcccgtccctgccccttctgtcctctccttctccttctgctctcgcaccacagggacgacgaagttgccgccctcgtgagttcaccctctttccatctcagccgtcgccgagccacccgccatctcgcgccgctccggcctccttcaccttgcctttcgctccttgctgacctttgacctctcccctctcgccaccccccttaggtcattgacaatggatccggaatgtgcaaggccggattcgccggtgacgacgcgccccgcgccgttttcccgttcgtgccgttccctcttcctccagcctcgcttccctttatcggctgctctttcgccttgccacctccagcggcgcccagctcggtcgtccgctgtggcgcggacgggctgccgacgttggagcctctgctcagacgcagttgcaggagcacggcagacgcgctgggttgagggtgggccttagcgagctggttaaagggagcccgcccgcaagccagccgcgcgagagcgagcgcgcaaagcgccgatggcggtccgcgcacgcgccctccggcgcagggagccgccttctcatctcgacccgccctgcctttctgcaacacccgtcgctgacatttctcatccctcgtttttgctgcagctcgatcgtcggtcgtccccgccaccagggtgtcatggtcggcatgggtcagaaggactcttacgtagggtgagtcggctctgtcgctccgatctctccgcaaccgctgacgcttgtccgcccgcccgcccgcagtgacgaggcccagtcgaagcgcggtatccttacgctcaagtacccgatcgagcacggcatcgtcactaactgggacgacatggagaagatctggcaccacaccttctacaacgagctccgtgtcgctcccgaggagcaccccgtcctgctgaccgaggctcctctcaaccccaaggccaaccgcggttcgtccttgtcgcttctcttgccttttgccccccccccccccgctcagtcaactgacgccgccgccctgctcttacgccttgcagagaagatgacgcagatcatgttcgagacgttcaacgcccccgccttctacgtctcgatccaggccgtcctctcgctctacgcctcgggccggacgaccggtatcgtcctcgactcgggcgacggtgtctcgcacacggtccccatctacgagggcttctcgctcccgcacgccatcctccggctcgaccttgccggtcgcgacctgaccgagtacctcatcaagtgcctgctcgagcgcggctacccgttcacgacgacggccgagcgcgagattgtccgcgacatcaaggagaagctctgctatgtcgcactcgactttgagcaggagatgcagacggccgcccagtcgtcgcagctcgagaagtcgtacgagctccccgacggccaggtcattacgattggcaacgagcgcttccgctgccccgaggccctcttccagccgtcgttcctcggcctcgaggcggccggtatccacgagacgacttacaactcgatcatgaagtgcgacatggacatccgcaaggacctctacggcaacattgtcctctcgggcggcacgactatgtactctggcatcgccgaccgcatgcagaaggagattacctcgctcgcgccctcgtcgatgaaggtcaagattgtcgcccccccggagcgcaagtactccgtctggatcggtggttcgatcctcgcctcgctctccacgttccagcagatgtggatctcgaagcaggagtacgacgagtcgggaccgagcatcggtcagtcgtcgcattcgtcttacacatgtcgtccgctcgctgacctcgccacctctatcaacagtccaccgcaagtgcttctaagcgctggacgcttctgccgtctccgtcctcgactcctgccccggtctgcaacgcaccgctgccgccggccgcgccgaccggttcgaacactccccttcccctcctcaaagcctgtagccactccctccccgcgcctcccttctctcaacgatagccatgaacacgccctcgttgttgtccccttgtggcccatcctgagcctcgaacgggtcatgctgcgagcagcgagtcccggaggctctctgtaagagattcttcgctggatgtcctcggcattgtggcgctggctggtcggccagagcatgacttaaggcgaggtatgccgagaacgtcccgtcaagcgatttctcgatgtcggtgttgcgtcggtcggcggtcagagaggtatcgtgctcggcatgacgcggcctcactgacggcctcgggcgggcgctgagacgagaggagctgccagcgtcgcgccgagcccctgttcggacctcaacctcgacctcgtcctctgtctctagccctccagtagccttccttatctatccactctagtccagtatgtccaccggtgagtcgtgtgccgtctgtctcgagccgcggcagcagggctggcgctggggccgcccaagggcacctgccgggcttcagccctccgacgagccggcattgaccgtcatcgcccttgccgtcccacagtgcccgagaaggtcgtcgaccaggcccagaagctcgagaaggagagcgaggccgagcttgaccagctcgtcaaggaggtccgtcgctgtgcgtcgtatcgagctctgagctcgagcgactgacatctcctcttccctgctggaacgacctcgaccaggacttcgacacgaccgattcaaacgcccgttatgcagcctatgcgactcggctccggaccgctctcagggcctcgcaccgctatctgtaggtctcggtcgactttcggcgagtctgacttgctgctcgcctgctcacgcttcctcatccctccttccagtgcttactcgagcgaggtcggcgagtcgttccggcccattgtgccgccttggatcgtcactgctacggtgcgcacgcctgggctgcccgattgcttgcgccgaagctgatgagctccccttcgacagtacggtgtctcttgggcctgttcgtcaacactcttcaaggacgaggaccggccagctctcgtgctgaaggtcttctggcggtccgtctgctgctgccctcctcagatcttcttggccgactcacaggctgacgtccgcctggcgttccgtcgtgcccttgcgtcccttagctacatccaggtgatgcggctcctccagaagacgtactggctcgagccggccggctcgcacggcgtctgggggctcgacgactaccattttctgccattcctcttcggcgccgcccagctcgagggtgcgctcagtctgttgtgagcgcgggcgcgtgttcaggcgagctaaccctcggtccacctcgtctttaggccacaagcatctcaagcctaagagcatccacgacaccgatatcctcgactcgtttcaggacgagtacatgtacctcgcctgcatccagttcatcaattcggtccgtccctggtcgccggctcgcgtcgggcggtctctatatttcgcgcacatgcagctgacgcgactcgatccttcggcccctgtagatcaagacggcaacgctccgctggcactcgcccatgctcgacgatatctcggccgtcaagcagtggtccaaggtccactcgggtatgcacaagatgtacgcggccgaggtcctcggcaagctcccggtcgtccagcactttctgttcggctctctgcttccgccgccagagggcgtcggccggctcgaagcgggcgacgagatcgtcgagcatgccggtcactcgcacgtcaagacagtcggcgacgtcaagggcgagatgtttggcgactgctgcggcatcccggtcccggtgcgtccgctttcccgcctgtcgcccggcactcgttacgacgctgacgccgagatttttcctcctgtggccgccccttgcagtcagcattcgcggcggggctcgaggtccgccagggcgggctcaagatggacgagatccgggcgctcaacaccgctcgaagcaatggtgctggcctcgtgccggttgactgagagcgacgcgagcctgggtcgtgatcttatgcgcctctcgctctgctgtcgtactgccagagccattgcgcctcgtcgtcggagagtgagggggtcatgcacaactcacagaggggcaagctcaaccgtcttaaaagagccggccaaaagtgtacaacgatcatcaagggagcgagccaaagagagagctgatcaaaggaggagggggattgggttaaagaagatggaggcgaaaagcgaagatcggaggtagaggacgacgtgctgctacaggcaacaagtgtaatctggcgcgaaagccggaaagaaacgggccgcgtgggacgcgcgtgcgtatgagagccccagaagagcttgaagcgaaagctttttactcagccttgttcttggggttctgtaggtacgggtagataaaggcgtaagcgtcagtggtcgaccaacaagaattaaggcgaagaagggtgaggcagggtcggacctcgggagcgtcggcccacatcttggcgaccttcttaaagcgttccttgtgctccatgtcgggctcggactccttctactcgacaagaaggggttcgagggcggaacgggtcagcacgcggcgcgacatgggtccatcttcaaaggagtgacagggacgaactagcttggcaagcgtgaccctgaaagaggttagaaagaggagaggaccgagcggtcagcatgcgagacgacattgagcggggacgcgtctcgatcgagggaggggagagggaggtgcgagcgcacttcatgtaacggttgtaagccgaggttttcttggcgccgccgccggacgtcttcttggcagcgggcttcttggcgtcggctgttgagcagcagagaggatgtcgtcagtggtagagcgagacgaagaggtcggaggcgtcgtctggtgcaatctaagccaacatgccgccgcgggaggaggagtgacgcgacgcgtcgaggcccgtcgccggtcgcgtcatctgccggcctcccgtcgtgccatccacccctgcaacgggtctcgctggatagccctctcgcaggccgtcccgccagatgcccagccaacacgtgggcggacgacggtcggccgcaagcccttccatctcgtccgcgtctttgcgtccggtccctggacgcgtcgggacgcgccgcagacctccgactgcgacgacttgggccggcgagcatgctcaagaggccagaggacgacgcaccagacttgggggccatgttgggcggttggatgggatgaagtttgggtagggtcgggcggtcggtcaaatgggaggctgagggtgatggtaagagggtgaaggggaagaagagagggcgggcgcgtgtcgagtgactgcctgcccccttcggccaaggggcgcgcgcgctcgcaaggctgtcggagctcaaacttgagcgggcggctcgccgactgcttgagccggccggccggggaggccgaccttacctgaggaactcgtgcgagccaagtacgaccaatgagcgtcgctgcatgctcatagttgaggtcctgcgttgcagagagagagagcacatgataacgagttggcgctcgtcgcaagggccgctcgccaagccggctcctacgcacagcagtctctgcaacaccgtctgacgcagttcctacgctggtcatcaatagcaaaggcctgagaagtgctctacactacgcgcaacagctgtctaggccgaggtaggccggctgcatggtattgcgcacctgtaagtggctgtggctcggcacgagtacgcattgccgcgcagcagccagcccagcgacgggcgcgccgccgcctccctgtcgccttgccttcgcgctgcgactcgacgacgaccctctcgaccaccaccgactctcgagccgaaacaagcaactcgcttaacatcacaccgctcgcgacatcctctaccgctctagctcgcccgcgctaaatgcctcccacaacacgcgacccggccgtctcctcgggcggtgcctcctcgctcgccgccctgccacccagctcggccggctcgctcgaaggcctcaagtcgggcgtcgactcgcttcttttgcagctcgaggaagagaagcaccagtccgtccctttccccttgcttgcggtcgttcgtgacgaatgctgctggctcgcgcgcttttaggcggccggaggaaagggaggtttgaccgcactctgcctgcttgctcgcgcaggcttcagctccaggtcgacagcctccggcgcgagtgcgacgtctggaggatgtcgttcctcgacctcgacagcgaacgtgacctgtacgtcagcccgctatcttccgttgcaccggcttgctcgcatcagcgttcggctcgagagctcgagctgaccgctgactcgctccgcgtgtgtgcagatggcggcaccagctcgaaaacatcgagtcgcagatcacacgcttggctagtgacggtactcctaagaccatgctggtccgcgcggacaacgatacgccgtttggcaacttggacgggcgtgaggccaaggacgagacagaggtacgtcgcccctgtcgtcctttactctacatctctggctgacgattgctttcatcggcaggacacatacaccttggccctcatggatgctgagactgtctgcgtgcgttgccttgcaaaggaggtgtgctttgtccgtcgtctgaccatcacttcaccgaatgccggccgtgtcagttttcgcgtagcctcctcaagaagggccgcgagggcggcgagagggcagccagcctcctgacggacgcgctcgccaccggctgggagaccagcggcggtgcgaagcagaaccggcggagtctggtcgcctttgtcttggtcgaccgggtgcggcctgcggctgcgcctttgcgcctgccaaagctgacgacgactgcttttactgttgcagtttgagctcggccgcttcatcatggctgtcagtcctgctctttgctttttttcagtttctagtcggctctgacaactattgcttactttggccccgcaggagggcgtgctcgactcttggacgacgctcgacgagtttgtcctcggcttcaacggcgcggcatcgggcgtgctctcgcttgtcgacaccgctcgggatgacgtgccgcgcaagctgtctagtgcgtttcggttattgtctctaggccgttctgtgctgactggtccgagctgcgagcggcaggccacattaagcattacgcggccgatgccacgtgcgccagggtcgtgctcgcctcgtccgaggtacgggcatcgactatgaaagagccgtgccagtctacactgactgcaattgacctccagattaatcgctacaagcggcttctacttgccctcaagtcaaaggcggtctttgtcgctggctgcgatccagcaaagaccgagggcttctcgcgtcagttttcgcgtgtcacatgggcctttgcttgactcagctgattttctttacgcgttgcagtcatacctgtgccaggtctcttctcgagaggcctcagcgccaagcgggcgggcgaggaggtttaccggccgggtggagcagactgtcctctcgcaagcgcttgacgtaattctgatctttgcgtctgttcctcggcagtgacgcccacgtcggccatcaactcccccggtctgcctgatggacatcacttctcgcagcaagcgctagacgattgccggtcgtcgtctcctggctttttgcgagggtcatcttcgacatctgttccgcggtcgctcgatgccaatcgtccgacactgcccgcttcccgtcgcgcgatcccgcaggcgcaggaaagctggacgaccgtcgtctccaagtcgaagtcaaaaccacttaaaccggccgctgccgccgtccctgcttctgcggtcaaaccgtccgtccctgccttaccagcaggggctcgggcaccgacgtcaggccgcaccagctcaggcaagcgcagcatcagctgtggctcgaagggcgaggcggtgggcaccggcgagcgtcagccgggcgacctcggcgcttgggagcgcgcgcagtgggctgagtataagcgcggtcggacggaggaggagctcgaggcgtacaaggtcggtcggcgtgcgcgtaaccaggctgtcgcttacacggctgacggcgtatgacgttgcttcttcagtacatcaaaagtctgaaccctcgcccgtgtcaccagcactacctatcggtcagcccttactcagcgcacttctctcgctcttgctcgaagctaactcgctcttgactccagggccggacctgcgaccacattgcgatctgcacctaccggcacgacctcacgctgtcgcacgtccagctcctggcgctggcctcgactgccaaagaggtcctctgcccgtccttcaagtgcgtccgcagtaccgcgagtcgttacggagagatgctgacgggtcgtctcttcgggtcaggtggggcaagtgcaagaagcccgagagcgagtgccttcacgcgcaccactgcccgttgtgcgtgctcgttcgcgatcgccacttgatgcgccggcttactcaaagctactcttgcgctgtgcgaccagcggcaacaattgcccgtttgaaggcacggacaacggaggctgctggttgtgcgtctcttcgtctgactgtgtcgctgcagccgctgctgactcgctcgccttgcgacgccttgccctttccagcccggagcacatcacggccagcgaagacggcacgtccatcttggacgagtacgacaccgacctgtagtgcagccttagcgagtggctgcgcacccaagccgtcggccttcgcctcctcgcatcctctcttgccttccctcctctctttcccgtcccggcctgcatgacgtcctcccgtttatcccggcgaaagcccgtgcccgatcgatcaaggaggagaaaggtcatgagagagaggactcagtaagcaaaccttaggctggccgacggaggcgcgggtccgtcggccgacgggcgggagcctgcgaatagtgagacgggggtgagtagcatggcgaggccctcctcaccgcggaccggcgcggcgggggggaaggcgagcgagggcgaggcggaggccggccgcagctgcaaaaacgagacgacagctttgtcaggactcgtaggctgggacagaaagcagcaaggtgactcggcgcactcgtctgacgggggctagagggcgaaagatgtgcagctaacgtcagcgcgatgagaaataggctgccttgcgtctaaacgcacgggatgcgcgtgcacgcagtcgtttgccggccgcggacaccgatcgagctgaaagtcgcggcagacctcctgcaacaggagcggttgcgtcagccaatgcgcccttccgcgtcaaatggtagaaagacggaccttcttgagctttctctcgaggaaatctgcctcgtcgtacgtcagagctagagagagtcgcgctcagcaggcgtcggccggataccgcgtcgatcaatcggtgatgaaagccactcacagacctgctcgtgcgcaaacgggcacaccttcagcgagcattgcgaggtcagatgaaagtgcccgcaggcgtgcttcttacggacctgaacagagagagagcgtagaaggcatcagcaggtcagcaataagactcggtagagcgatgctgacagagtcaaagcacgtacagccctgtcgagctcgacgtcgcgccgcttggaccgctcaagtgcgagatcagcctcagacggaccctggtcaagtttcattcgcttcgccaggctgccgcccgtgctgtgcggcgcagcctccatcgagccagggccggcaccgtcagtcttctgctgagagactgtgcctgcgtcgatccggccgagaagcgacgtcgatgctgcgagtatcggtgctggagcggccggcggaggcggcggcgaaggcggcgccgggtagtaaggagagagcgggccttggccaccggtgatgcgctggagcaaagaagagggcgcgaactcttccgacgtgatgcggctcaagaggacgccgcttccggtccactgaacggcagccggagcgacctgaggctcgcgcggtcgtttgaggtcgttggcggcagtcgtcgctgcggccgcgctaggcggcgcaggtgacgaggtccgcgttttgagcgcggccaccagagcgtcatgctgctcgccggacggaacgttggcggccgggggcaatgccgtcgctggcgcccagggcagcgaagccttcacgttgttcggcacagccgtcgagatccgagcactgagagcgttcgagagcggaggtggcggtgatgacggctgcggcggaagacccggcggcttgatgttgctgttgccgccgacgcgcgagagaagggagctggtcggagggggtcctcgcgatgccggacgcgaaatcgaggcaggcggagaagagtcgcgacgagctggaagaggaggcggacgagaagctgctggaggtgctggtgatgctggccgcgagatcggggccgactgcggaggagctgcgacggtcggcagcggcgggagagcctggatcggcggcggcgatggcgacggaggcggcggagtacgcggaggaggaggaggaggagggggaggagaaggaataggaggaagagcccggacagggtgtggcgaaggcggaggccgggaagcttgagccgatgcaagtggcgttgacgttcctgacggcgcgggggccaatcgaggctgggaagcctgttgtccgggccacggagcatagatgtgcgagccggacccgaccgaatggaccggcagcgtcacctgcggagagaccttaggcttgtccgcagccggttgaggacgatgctccgccgacggggccggtgcgatctgggttacaaggccgcctgcgatggagcgcggtgctgaaagtgggccgaacgcgattgtagccgggcgaggtgtcgtccctttggctagattggcaggcgtgccgccgttgagagcgagcgcatgcggatggaacggaagattgcgcgcaaaggcagactgatcaggagtgagaatcgtcggcgagaccgctctgccttggggagctcgcgccggcgggatgttgttgccgatctgccacttctgggtctggctagacgcttggaactggtgagccggcgtcggagcctgcaccgagagtgtgaccggtgccgggcggacggcaggcgttagacgcgagggtagatcattcgcgacggagggcaggaggactcgcggcgaccgatttggtgtcggcacagggtcgacacgaagcgacttttgagcccaaagtggtgacgcaggatctgcaggcttgctcggctggccatcaccgtgtggcggaggttcggccgcacgagcttgcggttgcggcgcaaggtcttgctggatggcggcgtcggccggttcgacggctgcgagatttccttcgagaaacggcgccttaggctttggaagaggacccgaaagatccggcgagcatgttgaattgcccatcacagagcgggctgtaggtgaagtcggccggatgtcctcgagtgtcggctggatgtcgggctgcttgggctgaacggcggatacccgctcgatgagctcccgctcggccatctcgagtcgagcagcaagaggggcgaggagggctgctcgagaagagggagaaaggtcctgcacgatggtggccgcagcttggtcgagaggcggggcgggctgaaaggctggaaggctgggctgaacgggtggactagcgagcggtgcaggtggcgctggcaccggccacggcggaggactgcaacgcataaccgacgctgtcagcctgtaatacctagtagcgaaactcagtcagacgtacgcgacgaggaaatgagctgcgaaagctcgagagcttagcggtgcggtgctagtcgaataagggacgtccagcgaggcagccgacgagctcgccctgctcgagggcccggcgccggcgccgaacgcgaaggccgtcaaggtcgatccgcccgaggcagagacaagctcaccgctcctgacatgcgctctgagtctgattgcggatcggcccgacgagaggaggtcaggcggtggggattgacagtgggcgccgggacgtgcgagaggactcgcctcttgagctccttcgcgtccgacatcttgtcgcgccgagacgtcatgtaaagcctcttccagcgttccttctcggccgtgagatgctcgatctcgagctcccgctgtataaccaggcatctgtcgcgacgacactccagagtcagccaagacggccggggagtggctggctcatccaagaacgcgggacagctttcaactcacctgaggtcgtcgacgtcattgacatccatgtcggacatgctggacactgtctctgctgccagccagagactctcgggtgacatattggatgcggcttgaggtgctggtcgaggtcaggcaggcggccgacaggtctcccgttgctcgtgggaggcgcgacggtcggcgcagcagctccagacgcgtctcccgctgagccgcactcgcccgcttgtcagggaacgccgtcagacagatcagacacggcggtcatgcatctgatcggcccgagggagagtgtacaagtgataggagctcgaaaaagggaatcatcgccaccagcgcgcgaggccaagcccgccgacggcgagcatgagggcgaagacgaagaaaacgttgccctcgccgtcccgctgggacccgatggacctggcaggactgctaagcgcgttccggatcggaaggaaaagggcgccaacgacgaggttggacgtaaagttgaggagaagcgagacggacgagatctgcgggacgagcgccgcgggcgagagcaagggcgggagtaggaacgggacgggaccgagcccgacggcgaaggagccgaccatgaggaagacgccctggccattggagaagatacgtcagcggttgtcaccctgttgaaagggaacgacgaagggactcacggcggccgctaggtgcgactgttgggtgttgatggcccagccgagctcgacgcaactgacaaacattccggccgtcgagagcagcagaagccgacgcgggccgagcgagtgtacgagatagatcggagggaacgtcatgactgcaaggatggagtcattgctcagcgagtgggcgaatgagcgtcggttgtgctacttcgaactcacgggcgttgaaggccgtgaggtagaaagccaagtaggccgcctgcgaagggaagaggggcgagagcagcgttgtcgagtaaaagagcactgcgagggcgagcagcgtcagcatcagcttttgcggtcagtcgagcggctcctccatttgttgagacacacctgcgttgattcctagatcgacaggccaagaagctggtcagtaccgatcgcctgagccctctgatggcttgggccaatcgactcaccagacagctgctgaagaagcatcgccgcgagtgcaacgagcgtgcccttgcgagcctcgggcgcgaaaatcgacgtcggcgcgtcttcaggcgccgctgcggagacggtgtcaggaagcagcgcctcctcctcgtgcgctgcgtcctgccgggcggagatggcgatcgagctatcctcgtccttggccgggtgaagcaagacgcacggcgcagcgacgatttggacaagcgaggcgattgccgagatcatcggaatgaagcgccatatcatcggctgcgagagaccgagaccgactgcctgggctgagagctatgacggtagggtgagggtgagtcgtcttcacggtcccagccgagacgccaggacgcacgatgccgatgacgatggccagctgatgaaggacgccgacgctgcctttgaggctcgccggtgcaagctcgcccagcgcaggcggaacgagacccatccctcccgctgcgccaaagccggtgacgagccgaccgagggcgagcgaccggaggccgaccgcgtacgactggaggagctcgccagcgagtgcgatcgctgcgcagagggcgaagcgcttgcggagcgtcgtcgtcggccggaggtaggaccaggccgtcgaggtcgagatgcacgagagcagaccgccaaggacgaaggccgacgtcacgacgccgtactcggacagcgagagccggatgcacggcgggagagatgacttgggcagacccgccggcggaggcgggctgtcgcagctgatggccttctgcggcgcattgagggcctgtggtagcgcagaaaggattgtcagccggaggcgatccaagccagctgacagcgagggacggacagagatgtggaagctgcaaggcagatgggaacgtcagcgtcagcgaggcgggtctcggcgacagctgcggatgcgatgaagggccgctcgaccggacggacccgtagcagaagctcgagaggagcacccaaagaatggcgatgccggttgctggggtgaaggagcccatccttctcgtgccgaatagagtagagtggatgtgcctcggagagagtcttggtcgagaggcagcggccatctcgcccttcttctgcgagcgacattggcccggggtcccctctctttcgtcaagtgctcgcgcagaaggtcggccgacacggtcacgcctcgacgtccagcatcgacaaacactgctcaacggtcatctaaagtcgctgctcccttgaaagctcgcaccagcagcgcctccgatgtccgaggacagcttgcagcgggcggcactcgagacggtcctctcgcagctggcgccgccgaagcgtacgtccgtatgcctcgcctgcctgcctccctgagagcttcagctgaccctcgctctacctggtctacaagtgacggatgctcaggtaatcgctctagcgttcctcgtacctcaggacatgctccttgcggcgctcgagctcatcgacactcacagcggtgcgttgctgctgcgctctgtctcttcaacctgcccgtcaccctgaccttgcctcctctctcaacctggcagtgcaccgagtgacggctccctatggctcgacgctctacacggtcgctggctcgacccgtccctacctcgtctctccacgcacgccggcttactgcccgtgcccggcgttcgccttctcgctcgtctcgacgggctccggagccggcatcgactgcgacgggtggtcgggactgtgcaagcacctgctcgccttgagactcgccctcgcgctcgacgccgacgtccacgaccggcttgacattggcgaaaggggaccggccgaggaccagctgctcgggctgctgcagcgggtcgagctagccggctcttagggcggtccgtcgcccttggcggaacggcccgcactctcgccgcattgcccgtcgacggtctcctccgttatcagcccaaagggctttggctcgcctcgctcaacgtctactcgcatggtctgctggcctcaggactcgtcccgaccttccccgacgtcgctagctctgttcgcggcagatccggctccactggcggcccggtcgcatccgcccatctccccagccagcctcgtccgagaaaatacaagtatgagcgacagacactgaacggagtcggccgccatcatctccaccacgaccctcatatcatgctgtcccgcctcctcctctcggcccttctcctcccggccgcgcttgccatgccggcccccgacctcgctgcccgcgacaaaagcacggcacccggcctcaacaagcccaagctcctcgaggcctcgtttgttcttgtcggagactcgacgaccgcaaactcgacgacgcccaaaagcggcggctggggaaacggcttctgcgccagcctcgaggccgacacgtggtgctcaaaccgggccgctaacggacggtcgaccggtgcgtctttcttcccgctttctccgcgcaggattggaaagctgatcagattctttctcccctgcaacaggcacgatcgtgaccgacggtgcttcatatttgtcttccgtctagcgatctctttaagctgacgactctcgccgcccctccttaggcttctgggatctcgcgctgcaggacgtccgccaggagaccgccaagggtaaggcaaccttcgttacgatccagttcggccacaacgatgccggcaagactggccttcctccctcgtcgatgggcgccaacttgacgcagtttgtcgaccagctgcgcgagatctcgccgctcgcgatccccgtcctggtcacgccccttacccgtcggtccttcatcggcgacacgggcaagctctccgatgacctcgtcgagtgggccgctggtgcgtgaatttatctcgctcgcccgacatcgagagctctcagctgatccaccgcctagcgaccgccttcagagacacgcgctgtcgccaagcgagttggtgtgccactcatccctctccacgaggtctcggcctcgtacgtcgagcatatcggacctgctgcatcctggatcctgaacaacctcgactacagttagtgacggccgactgacgcgcggttagttctcttcgaattagcgctgacgcaccatttcactcgatcgcgcagcccaccttggcccatccggaacggccctgtttgggtgagcacccttctcgactccttttcttctcgactccttttgacgaggaacagcgctgaccaggtgttcgccctccagacgcatgatggccgacatgatccagaccttcgcgctcaactacgccggcgtccccaagatccgctcgcctttcatcccgaacccggacctctccgaggccatctttgccaacaagcaggtctacttcggcgagcgcacccacccgccgatgaacgtcaccgcgcccgccggcctctgcaaggcctgagcggccgggtcgaaggggggacgggggggggcctaaaggctgtactatcgcggaccgatttcttacgattgatgtacttcccagatcctcattgcgactagacttatattgcgaccgtcttactggggcgagattgggcgagcgtttctggaagcggcaggtcgcgtcgctgcgtcaccggtctgagtggcgcgtcgacgcgactgctcttcgcttctgcgcgacgctgcttcaacatgccctccgactctcatccgctctcagctctccattcaccctccatcactgcgccatgccacccatgcactcgacgcctcgaccgccgccagctcgagcccacctggcggccgatcagacgctcaacctgtccttcccgcccaagacgcccggcggcacccggctcggcggcatggacgactggctcgacggcatcgacctgtcggccgagatcgaattcgaagaggaggtcctcaccggctttggcgagcggcggggcaatctctttgccgtcgacgacatccagggcctccaggcttggcagcctgtggcggcagcagaggagccagggcggacggtcaacgaaccgacggtcgagccatctgccctccagctacccacgccgtcgcccgagccaggggcgctgccgctccctctcgcccaagcacctcgcctggcctcatcatcgaccagggtcagtcgtaatgccgtcgcctcctcgtctatggcttccccgagactcaagtcgagccgggctgcttcggatgcgctccgcacgcgcgaccagccccctcgttcaacggcgcaggtcgatcagcagccggtcacctcgggctctcgtccacgaccgaccgtctctctccagcctccaagctcttctcgaactcgagcgacgcgctcgaggtcgcctgtcgacggcgagccgagcagttcgagacatatcgactctgtcgtcgccgctcggccgaaggcggcccttccgcgcccgaccgtccgtcgcagtcggagtcgctcgccagaggtacacgctgccgccagtagacctcggccgtcgaccgctccctcagtggcatctggaccaacccgcctgccgggacgaagaccgagcacggccctcctctcggcgacatcagctgcgcccgctcccgccgccaccgccgctcgccccttaccgaccgagccccaagccgcttaccggcaagttccgggcaacggctcaatccggtcgtttgccttcaatcactcacggtctttctccttctcgtgctcggtcgacgagccggcgaaggatgacttctttgcccgccgcctgcgagactcatacgtcgggcccgtcggcatcactggcttagcagcgagcagcagcccgccgtctgtcgagcgggatgatagcgagagcgtcgagcaaggcatcagccggcttcgggaggagatccaggtcagctgtcgtcttccatgtttgcaactgcctcttcggctaacctcgagtttgcctttatacacacccagactcgacctcggtcgtcaattctccacaatcggtcaaacactccgttagctcctcgaacggccgctgtccacgcatcctcgcatgaggcgcctcgatcaccttcgccagtcctcggtccttcacctgcgccggagccttcgcacagcaggcgacagagcgcgggcgaggccgtcctggccttcttcttcaagtaccttgtccgcagcggcgatcccaaggtgagcctgtcagtagtgcaagccttgcagtcgcttgaggctgacattcaaacctcaccaggacgttgccgtggccgcgactccgacatcgtccatcgctgttgaggagcgccgatcgacgacaaagcgcgcccgcccgcggtcgccttctcctccgccggccaagcggtctcgtgaagcgactacgacctcgacagcgagctcctcttcagttcgcgcgcctttcggcgaaaaggcgcgcggtgacggcaacggtcgcgtctcctccgtcgcgggacccagttcgcgcgcaacagggtcgaagagcgccagcaaggctcggacagatcccggtcgacagccgctgcccgcttcttcacggtctgccaccaatacttccgccaagcgtgtcaccaagccccgaccgtttgtcttccagccactctcgtcggacctgcgcccacccgcgccacccgcgcctgcatcgaggtcgggcaagccggccggcttcgtcccgtccttccaggaggcgcacaacgctctcaccatccacgccgaggcaagggctgccgcgcttgccgctcagaaggctaagctcgcggccgagcgcgaggccgcgtccaaggcgctcttctcctgcctcgaagagcgcatggctaagcgaggccagtgggaggaggagatccggcagaaggaggccgagaaggaggcacggcgaaaggaggaggagattcggcggctggagcgcgaggcgagggagatcagggaggagcgccgacggacgatcgtccgggcccggccggtgcccgacatgtaccgcggcggcatgtgagcagtgcatgaaccatcgaccatctcgacctgcgtgtacttgtgggtgcccttcttcttggtagcgctaccgtctattcagcgctgtacgggccgctaccctgagcacatcgatcgtgtcaaggcgtccgtaaaaggtcgccgccgacgggggctgctgcgcatcggccagacgacgacctgcgatggcgcccatgcgggctctcctcctctttcgtccctccgacgctgtcctcctgccctcgtcctcttaccacaaacggacctctctcttctctttctgggacccatctcgcactgctttgatacgcatagaggcttagacaaaaacaccctgtgcgtctgccgtgtgctcggcgggacctcgaccatcgaggctcagagatctgaccgagccgccttgccttcgcccatcccttcgttcatcgcgcccggcctcttccgcgtgctacgtgccatcatgcactcgaatactcggacgctcccacaacaatgtcttccgatgctctcggacactctgcttcgctgcttcggtcgcaacctcgacgacgccttgcccggtcgactgtcctgctcaagcagctcgccttccttccttcctcgcgtgctcacacgcctcggctcagctctacatcgcaggctcatagacccgtatgcccttacagagcttctgatccgccgtgcttgcagctgacgtctctgtctctcgctttatcgccggtcgaagtagccttcgtccaactgctcgaggtcagttgagctgctcttccgagctgcggctgcagtcgcgaccgtcatctagtcttgccaccggcccctatgaggtcacctagcgctcttgctgcatcttctagctgggcaggcgctcagctgcgtggtcggctgcatcctgttgcgacgacttagccgtgggcctggccggctggccaggcaagcagggcttggttgcgcgcgccctccggcgtctccaaaccccgcgcgccggccgatgaggtcgctgcttggcgaggctccgcctcgtcgtcccttcgatgcatctcgcactgctcgagctactggacacattgtggacttgctcgcagatggacgcgctctcatctcgcgttgacctattcgctgatcaactcctcctgctttcctgttttcctcccttcgtccaacctatcgatcaccctggctacgcgtccatctccgatcatcgctcgaccctgcaacatcgccggcgcccaatccaggtctcttccgttttcgcaccagaccagcttcgctcgccctactcgcttgctccgatgagcgtacgtccgtcgtcgacccgtagccgttgcgggccggaagcaaactgacgcccaccgcgcacttcagagatcttcgcagttcgacaacggcgccctacactacgcgacggctgccgtcccttcgccaacggacgacctgcaggcccggttcgccagcgcgccctctttcctcatgccatcgcctcaggcacagcagtacccgaacgtcgccgccccgccgccatcgagcctgaacgggaacggcttcccgacgacttttgagatggccggcctcagcccgacggcgacacatctcatcccgcagggtctctcgccgcacgcgccgcagcacatgcacccgcagcagcagcacgtgccgatcagccctcagcagcaggctcagctgatgcaggagcagatccgcgtcatgcagcagcagcagcaggcgcagcttctccagctcggccttggagcccctggtggcgcgaacggagcgggtgcgccaggcccgcagggtgctggcggtcaggctggcttcgctggcggcaagcagcgcttcggcggtatgaacccggcccagatgactggcaactacggtccggccgctgctgccgccgccgctgccgccgctgcggccaacaaccagactggccggaccgtctacgtcggcaaccttcctccgggtccgtgccgcccagctgacgccttcaatggcggcagtcggcagcgggctgaccttgcgcgcctgaccgcccatttgcagatgcctccgtcgacgagctcctcaacctcgtccgcttcggtccgatcgagaacgttcggcttctgcccgagaagtcttgcgtcttcatctcgttcctcgacggctcgaccgcggccgctttccacgccgacgcctcggtcaagaagcttgcgctccacggccaggagctcaagatcggttggggcaagccgtcgacggtcatgcagtcggtcggcatggcgatcaaccagcaccaggcgacgcgcaacgtctacgtcggcaacctcgacgaggagacgaccgagcagagcctgcgtgacgacctcagccgctttggcccgatcgaccaggtcaagattgtccgcgacaaaaacatcggcttcgtccacttcctctcgatctcgaccgcgatgaaggtcgttgctacgctgccgaccgagccagagtgggagggtaagcgcatcaactacggcaaggaccgttgcgcttacgtgtgcgtgtcggcgcgctttcgtgtcgaacttggcgcggcgctcacgtcctctctacttcccttttcgcaacagcccgaaagcccagcaggcggccgtccagcaggcgcaagcgcaagcccaggcggcgatcggccttgccatgcccggctcgcccttccttttccagcaatcgggcttcgggggctttggcaacttcagcaatccgaacctcgagattggcgcgctcgccggcatgggcccgggcgggctgatccagaaccaggctggcaaccggaccgtgagtgcttctccagtttgcttgccccgttgcaaccaacagcccctgaccgcgtctctccgtcgtcgtagatctacgtcggcaaccttcaccctgagacgagcttggacgagctctgcaatgcgatccgcggcggcatgctagcccaagttcgctacatgccggagaaacacattgcagtgcgtccgctctcgcaccgtcagtggccagaaacagggactgacgcagaagactgccacagtttgtcaccttcgtcgacccggcttgcgccgcctcattccaccagtgggccaacgtctctggcctcatgctgaactcgcgccggctcaagattggctggggcaagcactctggcccgctcagcccgcagctgcaggcggccgttggtcagggcgcgagccgcaacatctgttagtcgagtctctcccttttgctcagtctcaagagtattgctgatcatcgtgacgttgctcgtctctagacgtcggcgccatcaccgactgggacacgttctcggaggagcggctccggcgcgacttctcggagtacggagagtgcgtcccgctcgagactttctgcgcgttctctctgagcactctggaatgacgcccaccgtccggctcactcgcaggatcgagcttatcaaccacctcaaggagaagggcgcgtcgtttgtcaactttacctcgcttcagaacgccatgaaggcgatcgacgcgatgaagcagaaggcagagtatagcgcgctcaaaatctcgtttggcaaggaccggtgtgcaaacccgccgcgggccaacggccacggtgctggaggagcaagcggcggccggaaccgccacgcctcgaacggcgacggcaactcgcagcagcagcagcagcagcagggctccatgtcgaccggcgcttcggactcgacggccaagacggctggaagctccaagaagcagaagaaggacgactcggacgtcgccgagctcgagggcgccctccgagcgactgcgctcgaccaggtcaaggaggagtgaacgcggttgtctgctctgttcaccctcacgcgcccgatctgtcgccttgtacttcgactcgctcccgccttcaaccgctctgcaaccttccttcctaccctgcccccctactgcacgaccgctctgcactgccgcccactaaaactcccccggcacgatccctcccctccctctccatcacccgtaggctaggactctctcacgacacttggcccgtgctgcattctccaaacgctcgcgcacgctcgctcgcttgcatctgtccctgtcttgataccccttgacgacgcccagccaggcacggaagaagctcaagaacagccgtctatcgcacaacaagcggtcgtcgtcgccgccctctagcgtcgccgtggctggagcggcctcccatggacgagatcgcgcacgagctcctcgacctcctcgacctgtcgaaacttctcgacgacgacaccgagcctccggagctccttcctgctctttcggaagcgctcgcgaaactcgtcggcccgccggagggcctttgcccgggccgacgagactgcctcgtccatcagttcggccggcgcgtcctgagctgcgttgacgatcgtcggcgtcagctgaggtgagggtgggaggtcggcgtagagcgggtcgaggaggtcttccgagagctcgccgggctcctggccgaccgaccggtcagacgggccttgacgtcgctcggtcgacgacgagtcggccaggccggtctgctcgagcttgagcgcgacttcggccgcttcaaagtcggctctaggccggccggtcgtcgtcgtcgtcgacccgcggaagagcgcgcccgagcgcggcgaggccgtcccggaccggagcgcggccgggatcgacgccttgacgcgccgctttgtcgagtcgagcgtcgacgagcgcgagcggttaggcgtgctcgtcgccgtcgtcgtcgagctggatgaggcggacgaggcggacgaggccgtcgaggacgaggcgattgacgacgcgctcgacgcgaggggtgtcatgcccgtcagaccggccggcggcttgttggtcgccggctttgagcgggccgagacgtcacggatgaagatgccgaggacctgcgacgacggcaagagaaaggcatcaggcgcgtaaagctcgatcgctgaggtggtaagaggagacggacctggtgcggccgctcgatggcgatctgcgtgtacaggtcgaggtcctgctcggccgagtcgccaaacatgacaaactggctgtctgggaagccctcgaggatctggatggggtcgaccgacacgtcagtgcccctactcgagcagatcaggaagagggagaaacgtcaagagccgcacctcgagcacccccctcgccttgcgctcgcccgccggctcccacaagccgtgaaagagcgagcggccgccgtagaacttgagcttgagcgagaagccgtcgggaaaggcgtttgcgtggaggaacgaatggatcggctcgaagagctcgaggggcgagttggactggcggcggtgaggaggggagtcagtcagtgtcaagcacggcggaatggaaacggatgaaagcccgagcgacgcacgacgtaatggaagccattgacggccgggacgagcgacctatagagcgcgcccatcccttcgacctcgagctcggcaacgtcgcggcagaagacgtttcggaagacttcgcggaggccgccaactaggtcggtccgcttgaccgtgtcgtccaggtcggagatgacgcgaacgcctgcgagcgcgcgagaggcgccgggggggggggcttcacaccctctccccccttcaccccctctacccctcgctcgcaggcgcccgacgcccggctcgcgagcgccctctggcggccgctcatcaacaccgaaggcgacaacgtcatggtctactaccttgctgacgaggatcacgccgagcgtgcctctgccgccgcccaccggctcgcccccgcgcccgacgaggacgcggagccggagcggccggtgccgtacaagcttgcgcggaagtacgagctcgtcggcggggcgtcgggcgcgaggcacggcgccgagctctcgctcgtctttcgcgagggaccggacgaggtggtcggcccgtccgggaggaagcggaagcacggactggccggctaccacgagtttcactcgcgcgcgacgctccggaagaagcgggtcagtagtccagcgtttctctctctttgtccgccctcgcgctgggacttactgctgacgcgccgtgtggtcatctttgctcgccagcgtaatccgcacggcaacgaccccgaggagagcgtcccgcaatgggaccacatcgacctgacgctcgcgcctgcgaccggcgaggcgctcgacgaccgggcctcgggccgcgcgccggtcgacgacccgacgtgggggccgcggacgctcgcggcgatggaggagggaaaggcggcagaggagaaggcgtatatgccggcgtcggagcggccgggagaggaggagggcgacgagggcgagaaggtgaggggcgtgccggtcggagcggtcgccgccgtctaagccaaagtgctggctggctggctgggattttgtctcgatgctcgtgtcctctacagtatattcagtcgctcgcttgacgctcgacggctggaggagtattgtcacctgcccgcgccaagagagggcgacgcgcccgcagctcccgtcttgtcgcccaaccaccaccatcgccatgaatgcccctcagcagcagcagcagcagcagcagaacgcaacagcgtcatcttcctcggccgacccgtttgacgacgagtgtgagcccgcacgagagagcagagaccggccgcccacgcggcgctcaagagactgatcctgaacggtcttgttgccagtcttcgccgacgagcggccgaccgctcctgctgcggaaggcagccgtcagccctcgacagcccatctcgttccttccaccgacggtccgtcccgctccatctcgccatgtgcgagagctgcccaacctgaaacctgaccttcgaccgatgagcgcacaggccggccggcgacgacgacggccgagacggacggcctctcatggcggctgaagacgatcacctggcccgacccgcgggtcggcggcgagcggcgcgaggtccagatcatctgccaggtgcggctactctctcctctagccagcctcaatttggaaggaggctaatcgacgtcgctcggcctggggatagagcctgaacggcccatgctcgctcatctcgctctgcaacgtcctcatcctccgagggagcgtccacctcccgttcaaccggcccgaccgcgtctcgtacgccgacctctcgcatctcatcgccgactttctcgtcgagcgaccccaggggagctcgcgcttgtcgctcgaggcggcactcgagattctgccgtcgaccgtcagaggcttgaatgtcaatccggcgtttgcgggcgtcgggcagtttgaggcccagggcgcagggggcgagctcgccctctttgagctctgtggtgcgtcgctattgcggttgctctctttgcctgaaggctctgctgccggttggggctgaccgaccttctcctacccttcctcaggcgtccagctgacgcacggctggatccccgatgcgacggccgacgcttatcaggccgacgtcctcgaccgcgtcgggacgtacgacgccgcccagctcgcgctcgtccgtgtgtccgaggccgaggccgcactcggctcgggcaaggcgactgcagagcagacgcaggctatccaggacggtcagtcgtcgcttcccctcccttgcactctggcccgcttgggagctgacgcgtcgggctttgatttgtcgtctgtcgtagctgccgtcatccgcgacttcctccaggcgacgcagacgcagcttaccgtttctggcctttttgcgctcaacgactcactccacgagcgggaccttgtcgccgtccgtcctctctatctctcttttgtgaggtcactctcccgtctgcctgcaagcgggctgacattcgatggaccccaccgactgcagctcttccgcaactcgcacctctcggtcctctacaagcgcccggccgacccgagcgatccaaacggcccgcttctctactcgctcgtcaccgacgagtcgctcctccgcgagcccgaggtgcgcgccgcctccagctagctctccgccgcgatctctcagctgacgtgccattgtgtccggatcccccttcgcccgcgcaggtcgtctgggagtcgatcggcgacgtcgagggcggcaacgggagctttgtcaacagcgagtttcaccgggcggcgacggccgggggcgactttgcgggcttgacggcggagcaggcggggcgggatgagtggtcgacggccgatggggccgagtgcgtcccctctcttgtcactttcgaacacggacgatctcgcgagggctgaccgggcttgcgtggttgcttgtgacgacccaaccagctatgaccagcagattgcgcgcaacctccaggaggaggaggacgcccgcgccgcccgccatctcgtccagcgcgaccaggagcgcgccgacggccggagccggcggacggccgacaggtcgaggcctgcggcggcggctgtcacgggcgggtcgtcggccgacgggaagaagaagaagaagggctgcgtcgtcatgtaaaagaggctgctcttcttctagatcggcccctctacgctgtcccccctcgttcggtacgatctgcatggtgcgctttcgtcggtcgcagccgcttcacaaagggcgatgagaggttcgttcgatcgacgccccctccttcatgaccgcccgtcggccttgccctttgtcaggccgaggccggtccgcatgatctccatcgcctcgaggtcctcttgaagaaccttggcgacgtgctgcagcgcctgctgctgcgaggcgatgatctgcgaagggggatcagaggcgggatcctgtcagcaccagagcgaactgagtttaggagcgggcggaagacggaccgtctgcagctcgttcatggcgccctcgtcgacaatcgcccaaccctcgcggccgcctgcggcactccggtcgcgatcgcgctcgctcttgacctcgccgaggagcccccagagctcgaccatccggcccttgagactgtcgcctttccggccccgaccgccctcgagctcggcgacgagcgcctcgagccgctgcgtcaggacctcctcgtcgcgccggatcgagctcgaccggagcgtcgggatcagcaggtggaggtgcttgatgagttggagcgtccggtgcgagagctgcgtctcgagcagctgcgcccgcgagagccggagcgagagcgacatgtgcgacgacttttgcagcgccgccagccgcgcagagatctcttggagcttggcatagtgcgccccggcgacgcgcgtctggacctcggtccgcttctggagatccgcaaagccgacggcgatggcgggaaccatcctgtaagggcgagcaggtgacgatggtcagccctgtttagcagctcgacggccagcccggaaggacgcacgtcgacggatcagggttggcccggacggccgcgaaccacgtcgcgtcgtcgttggccgccggcgggcgctggtacagatcgacctcatttggttggacgacgttgtagaagaaggactgggaggcaggagcgcgagggtcaatccctgctcagtcggccaaagctggccggcagcagccgcgcaccttgaaccggcacgaaggcgagctcggatcccacgcgttcttgacgagctccatccgctgctcgatcggcagatcctccggcttgagcggcggcggtggaggctgctgcgacgctgcgagcgagttgccgccaaactgaccttgctgctgctgctggggctggccgaagagaccgaacgactgggccggcttaggctggccgagctgcgagacggtcagagagttgttctgctggccgccgaagaggccgccgccctgctgctgctgctgctgctgctgctgctgctgctggccaaagaggccgccagttgactgctgctgctgttgcggctggccaaagagcgacgacaatgccggctgctgctggccaaagagcgatgtcgaggctggctgctgctggccaaagagagatgaggtcggctgctgctgctgctgagcgggctggccaaagagagaggtcgactgctgggtctgggccggctggctgaagagcgaggtcgatggctgaggagcagagctcgccggtgcgcctgacgaccgcgttcaaagaggagcactgtcagccggccaggtcacacacgcaggctggtagcacgacgggccgcaccgaatccagagaacggcttttgagctggcggctggccaaagagccctcccgaggccggagccggtgaggacgaggccggctggccaaagaggcctcctcccgacgcaggagccgcgccaaagccggtcgaaggtgctgcaggagcagctgcaggcgtcgcaccgaaggagaagttgcctacgacaggatggcaggatcggaacgcagagacgtttcagcaaccggctggccagaccaaacgctcttgctcgagctgagcgagcgaggtcgaggctgcctggacgcaagagacgcaccgaacgacatcgcgagtttcgaccaccggtcgctctaatctagtcgggggcgggcgatgtcggtcctggttctagctaatggagaaggcggctgtgttggcgtgtcaggcgaggtaggtcagggaggatgggcgtgagcaggacgagagcccgaccttcgcagcggcgggcgcgtccgtcgaggcacagcagcagcagcagcagcccttcgtccctgcctgccgacagccatcgcacatctcggctcctgctgcaagtcggaccccacggccaaggcttctggtcggtgtcgatccccttcttgcatcgtgtctccctctggctgaaggtccaagacgtccctggctcggcccagcgcgccgccctctcgacggtcgaaccccgcccgcgccgctgacgctgtgaccccccctcttcccatcgacctcgcctcgagaggacacaaggcccggtcaagcggcccaacacgctgacttgacgtgacctggagctttctaccgccatggagttcgtcttccgcagtcctaaatcgagcagagccgcagactgacaggatcgcctttccggcctgacgacccctttctcctcgctctcgccgcctcgcagcatcgtgacgcgcctggaccctttgctcgagggcctccggtccgacaagatcaagacgcgcgaggctgctctgaaggatctgcttctcctgtttcgagacggcaagcgcgtccgggagctcgtcgaggcgggcgaggatgacgccaacgtcttctcggacctcctcaaggccatcttccgctgcgtcgacgaggagaagaaggccgtcaccaagaagggtcagtggcttctatagagactctgcccagctggtcgcttgaaatgacggatcgcccgctccctgcgcttacagagaccgccgtcgccctccgccgcttgaccgacgccaccgctctcctccgcatcgccgtcacgcagactgccggcaacctcaaccggcggcacgccttcgacctgctccgacacacgctcaacgtcctcgagcacaagggcgcgctctacgagcccgccgcgatcgactacctcaagacactcaaatgcctctttagccatccgcagcacctcgacaacctcgacgggggcgaatgggagggcctcgtctgcacgctcacgcgcgcggcctttgacgaagacctcgtcagccacggcgcagaggtcctcgacgagcgcttcacgtccaaggaagcccgcggcgtcgacctcattaccgccctcggaggcgaggaggatctcaagggcaagcaaaaggcgaaagcgacgccgcgccggatcgagagcgaggacgaggatgacgagccgtcgaccccggcagccactgactctcggaagcgaagccgggcaccctcatcccgaccacatccgtcaacaccagggccctcgcagcggatctcgtccatgacgcagacgccgtcgacccagctcttctctggcgcgacggcaggtcgggtcctcagcggcggccagcagcggtcgatctcgcatacgcagatcgccatcttctcgctcctcctgacactgctgcagaacccgcacagcctgccgctcctcgcaacgtcggtcgtcccgccaacgctgccctcggccgagggcgagactctcccggcagccttcccacgatcgaacgtcgcactcgccatcctctacaagctcctccgcttccttatcttttaccccgagacgacgtcgcatctgagcgtcctcaagagcgtcaacctcgtgctcggtgttgtccgcctgaaccagctccgtcccgtcgcgctctttgccgaccggctcctcccgacgctcctccgactctggaagacgaccaagtctaaggagatcaaggagcagctcatggtcgcgctcaaactcgtcctccctttcgtcgcacgcgatctgccggccgacttcggcggccggccgagccggaacgaagaggcctcgcaagtcgttggcgagggcgacgtctcggccgccgagaagctccagaggatcaaggagacgctcgacgacgtgttcgacagccgttgggcggtcgagtcgctggcgctcgagagcattcggctcgagctcgctcggcccggccctcggacggcgtttgtagcgcagagcttcagggtatgtgcgcactcttcttccaagcgacgaggccttgctgaccgtccttctctttgacagttcggaccaaagttcgaggcctcacaggccgcgtcatgggcgaccctcgagctgcacgccgacgtctacgctgcggtacgtccgttcagtgctccagactgtggctttcgacaagctgatgtcgttgcctggtcgggacagatcgacgagctcagtcggagcgatgctccaacccacggcatgacgccacgcgccctgggcaagcgtcgccgaatcgacgacagcctggacggcctgctggacgccattgacgtctcggcctcgacctcgaccaaggtcgcgcgactgcagctgctgctcttcgtagtcgaccggcacggctaccagctcgatggccggcaccgtgagatcgtcaagacgctcgtcggcaccctcacgcacgacgatgcgctcgtccagagctgggcgctactcggcctcgctgcgctcgcttgcatcgccactgattcgagcggaccgggagcggccgtcaaaatctcgggccagcctgcgactccgtttgcttcgccagcgaagggcggcaagacgtccaatctcgatgaagcctgggagcaggcctgggcgttcgccatccgccgcatggccctcccggccgtctgtcgggccgcgagccacgccggcctcgccatcgcggccaatgcgcgtgtctcgctgatccggctgcaggccgacctcgagacaacgctcggcaacctcgaagtgcaaggcccgtccttcccgtacgactctgtctgcgccttcctcgacctcgcgctcggcgtcattagtcggaacgtgcggctcttccgcctcaacctcgaggaccgcgtcatagcctggctcatcggcgcctggagtgtcgtcgacgggacgaccaagggcttcaacgtccgcacccggctcgagaatcattcgccgaacgacttgctcggtcttctggcggccgtcagccgcttcgagcaccggccgagcatcgccggcgaggaccctctcccagagtcgcccgtcgtcggacacgccatcgacgagacccagtcagccgtcttgcgcgattttgtcctggaacatcgcgtccatgtgcctctgcctctcatctcgcctctcggtgctgggtcggagtgtcgcgctaccgaggcgattgcggagaacgtggccgcggtcgtgtcgacgccggacctcaaggatctcaccggccgaccgcttcgggcgtccgactttctgctcaagtcgatcgaggctctgctggcaggatgggaaggtcccaacggctttgcgagcgtcacggcagacaaggtccggcggtcgctcgacctcgtcgctctcgccctcgcctatggcggcgtcttagagctcaacggcgtccgcccgaaccgcaagatggtcaagcgggcctgcgcgctcgcgctcgcggtcctaccggccttgagcggaggacgcatccggctggccgagatggccgtcgccgtaaaggggctcgaggtccttgtgacgaccgagcgggagcctcctcggcggaacgtccgggcgaccctcctcaaaccagggccgatgacgggcatccggcgcgatctcttgccgccctcgtccgtcggatcggaccgaccacatgcggccgagctcgctctgagagtgcagctgctccaggtcttgtggcaggggtctgacgtacgttggccgaccctgttctcgatcacggcttgacaccaggtgctgacgcctgtcgacctgcttgtgcgcctgcagcttcgtgacctcttcacccacgccgtttgccccctgcgcgctattctcaatgcagccgtcggcgtcgcgccgtcagatgagtctggcatgaacgtcgacgcggacgagacaatggtcgccactgtcgtccaggacagtctcgaccacatgccaatggtcagcctcgacaagggcgacggtggcgacacgggcctctactttcccagccgggcggccgattggctcgttgcgacttgctttgcgacgacgacccgcggcgctgccctccaaagcggctcggccgagccgtcacgccagaaggagctgttcgacgtgctcgcaggctgcgactgcccgcaattcatcgcgctcggcaccggcgtcagtcgcgcgattcgcgacggctacctccacatctcgagcgccggggccgacgacatcctcgaaggtttccagcacttcctgacgagctaccagtaccggcggaacgagcttctgcacgcgctcgccatcgactttctctgcgcgacggccggcctctggatcgaggcatcggcgacgcggaccgactttggcctccacgcccgagctctcatcgagtacctcgtcaagcaatggtcgtccggccggctccggtcgcccgcgctccggattcggctcctcgactttctcgagcattacctccggctcgatccgcacgagcaggtctgggccctcctggacggctccgtcgcgccgactgccctcgagatcttccactcggccgctcgcgacgtcgacattgacgtccggttcgaagccgccggcatcctcccgcgcctctatgacaccgtggcgcgcctcgtcgcccagcccttccgcgactacaacgagacctacgtcgaaacggccgtcgccggccacgagcagagcttgacgaatgccgtcctcctcgccaactatctcgtccggtcgaccatcctccggcggatggcctactaccactttctcgacctcgagaagggcggcgtaagcgtcgtccatctccgggcggtgatcgagacggtcgccctcaccctcggcttcggctccccgttcgagctgtggcaggtctatgccacgacgatcaccgtccagtcgctcggcagctcgcccggctccgaatggaagccggccgcctcgctcatcggggcaacgagccagcaggagaacgcgcgatcgatgctccacgacctcggtcacctcttgatcggcaagcgccagctcggccggttcggcgacctcgtccttgcaagcggccggtcccaagccgacgtcgttgccgaatcggctccgcgagcgctcggagggctcctctgcaacgcgctcaagaactcggtcggcgagcgcgactttgtcaccgacatcgaggccatcctggcggcggccggctgcgcgacttcggcccgcgaccttgccgctcaaagccccgacgtcgtcctctctcaggccttctccgagctcatcaacccgaccgaaattctcgaggacctgaccgagagcgaatcgcagctcgccgcccaggcagctttccgcgatctcggccggccgctacctgacatcttccgctgggacagcctgctgctgccccggtcgacggcgctcgccatcttccgcgtcgacgaatgggtcctccgcgcagccggccttggctcgggcgacctgccgtcaatggccttcaacgtcctctttcagctcttttcgcggatcggccggtcgccgctcgtgattgagcagatccgcggcgtctactcgttcgtcttctttgtcgcctgccaccaagcggtcatccgggcctcgtccgcgctcctccgcaacctgctccacctcgccctcgtcctgatggagcaggacgagcttgcgcccctcgtcgatgcgctcctccactggggcctgggtctgctcgacggtagcggcaacggcgaggccggccagaccgtcaactcaagcgccccacccggcgtcgtcgagctcgtccttcgaatcgctcaggtcagcgaccgccttgagggccagtcgacgcggtcgagtctctctcaggtcggctacgatcttctcgtcgcggccgagacgactcttctcagcctccggaggaagacggacgcgtcgtggacggccgccgtcgagacaatcgtcgcgctctggccacgacccttcttctcgcacgaccttgtcgccatgcgagaggcatccagcttggcgacgctgagctcgatactggtgcgcctgctgcttgagcatgcgactttgatggcgaccgtgtgctgaattcaccacgctcttccgcctctgtagcgggaccgagaactggcgacgtccaaatttgcgctcgtgccacaactgcggcagctcgtggcagaccttccagccgaccggcgtgatgactttgctggcaactggatctggcagctcaagcaatcgctgccggcgccggacgacctgccgcggctcacgggccacatcgatggcttcctcgagattcttcagacagcacagatgcaggcgccatcgctcgaagcgatcgaccagctccctcgggcccgctcgcttgagtggcaccggcatcggccgaccgtcgaggacgcggccaagtcgcagatgatcctcgtcctcgtcgaccagctccagagcgacgccgtcgagacaatcgacatcgcctatcaggttcttcagggcgtcgtcgtcgccgctgagcatctcgtctcgtcgtcggccttccgggctgcactggtcaagctgcccgacgtcaaggagcagctgctccttcttggccggccggcggctcgtccgcatggtctcattgctccaccgctctccgacatctaccagcaagtcccggtctctagcgtccagtggccggccggctggctttcgaagctcgcctccttcctcgctcgggtcctcgtcgcgcaagacaccctctttggccacctcgtgccactcctgaactacagcgctgcctttgctgcggcagcgctgccgctgctcattcaagcgctcgtggccgtcgaaccggcggtcgaggggttgcagtcgcccaagaccatcctctcgacatactttgccgccgtcttgcgggcgccggcggccggcctgcccgtcaagcaggccatcatcgacgtcgtcctccatctgcgtcggatcgggcccaaagtcagcgactctagagcatcgggcgacccgctggcgcacgagcgctggcttgaccacgagtacctgtctcttggccgagcggcggtcgagtgcaaggcctacacgactgcccttctctttctcgagctccagcatcaggcgaccaaagaggcggccgcgccgagcgaggaggcgacccaaatcctcttcagcatctacgccaacattgaggacccggacggcttctacggcgtcaagtcggccgactggcgatcctcgctcgtccaaaagctccaccacgagaaccgctgggcccaggctttcggcttccacggcgcagactaccgctacgcgccctcgtccgcttcggtcgagggcgtctaccgctcgctgcattcgtttggcttcgaccggatggcgctcacgctcgctcagagcagcgactcgcaacacgcaggtcaggacgtcaaggacgacctcggctacgagctcgcttggcggacagagacgtgggacattcccgtatcggtgacgtcgtcgtcctcggccgacccgccttcgtccaacgccctcctctacgcggcgctccgggccgttcacaacgagcgcagcccggcgctcgtgctcttgtccgtgacgacggccatccaggtcgagctgttgaggctccggaccttgagcatcgagagcatggccgagatccgtgctgcgcaggcgacacttgtgtgcctgcgagaggtgcggcgctggctcgacctcagcatcggaggaagtgacctgagcaaggagcaatgggatgacgccctgccatgggtcggagacgatcacgagtgagtggctgcctggcgttcgcatcattgacgcaccgccgacctttttaacccccctcacccgtttccctctgtgcccgcagattcgccgatctcgagacgctcgtcagcgtccggtcgagcctgctgcagacggtggccgctcgcaagacttccatcgtcaccgaagacgacccgatcgtccgcggcatccagaaggagcttcagctgcggctcagcgcccatgcccggggctcgggtcaactgcaggcggccatcaacgccgtcacaatggctcagaagcttgacgtcgcggccgatacagcgcacgtcggagtcctgcacgagtacgccaacgtgctttgggcgagcgacgagcacggcatggccatcgacgtccagcgaggtctcctcgacgacacctcactcgtctcggctgacgaccgggccaaaatgcagcgcgcgcgacatctctctgtgctggtgcgtgctccgcctcagactgcagcgaccacaagagaccttgcgactgacaagctctgattggtccttggcttcctcccggcagggcgactggatgtcgacggcccggctcgacacggccgcgaggaccgagaccgtgtactttgcgccagcgatcgccctgctcggcggcctgccctcggccaaagagcacggcctcgtctaccaccgttttgccatgtttgccgagaatcagtttcggacgctcgaacggtcgcccgagattcagcggctgcggctctatctcgaccggcagcggcaggaactgtcgaacctcgtccaggccaacggcaagccgcggccaaacctgccgcgcgactcgaccggcagcagccgttttgacaaggtgacccgcctccagcaggacgacgccgacaagatccgcgcgcacgaagagtcggtccaggccctgctccggacggccatcgacatgtacggcaaggcgttggcgagcgcagacgactttgacgacgccctcctccggctcgcttcgctctggatgagccatcacgcgcgcgaggacctccacgcggccgtcaaggcgaccatcggcgccatcccgtcgcacaagtttatccgcatcgtcatccagctctcggcccggctcgaggacgcggcgacagactttcaagccatcctccacgccgtctttgaacgcctcgttgccgagcaccccttccactgcctctaccagctcctgacggcccgaggcttcggcctttcgcagcgcaaggagggcgaccggcgccggagcagcgtcgccccaggattagcctcggcggccaagggccgggacgacggcccacggacgtcgcgcagctttgcggccgaaaagatcctcgccaaagttgccaagaagagtgcgaccgccgccggccggatccgcgacgtcaacctcttctgcgaggccgcgatcgaatgggcctggctcccgccagagcagccaaaggtcgcgccaggcacacgcaagacggcggcgctcgtcatggacaagactctcaagctcgcccagatccgcaacctcgccatccccatcccgacggcgccgctcgcgatcgaactaacgtgcaggtaccgggccggcacgatcgtcaccgtcaagggctttgcccgcgaatgggtccgcgccggcggcatccatgtccccaagatcacgacctgcgtcggcgacgacggccggtcgtacaagcagctcgtacgtctcacgctcgccgagttcagactgtctgctgacgctcgcccgctcccgtccgtccagtacaagagcgacgacgacatccggcaagacgccgtcatggagcagctctttggcatcgtcaatgatctgctcgcccgggatccaaagacgcggtcgcgccacctgcacatgctgacgtacaaggtcgttcccctgagcgatctgacgggcttcatcgagtttgtgaccgacacgctaccgatcgacagcttcctccgccggtcgcatcagaagtaggcgtcgcgtctttcctcgcgctgcgccgggctcctgacgccagcctccctctctcctcggccggcagatactacccgaacgacccttcgctgagcgacctgcggaagaagattgctgaatggcagaatgcgtacccgcccgagaaggtcggccgcaagtttgccgaggcgacgtgtcgcatccacccggtcatgcgctactttttcaccgagaagcacaagacgccgctcgcatggttcacgatgcggctccagtacgctcggagcgcagcgacgtcgtcgatgatcggccacgccgttggcctcggcgaccgccactgctccaacattctcattcacgagaagacgggcgagctcatccacatcgaccacggtgtcgcctttgacggggtccgtctctgtcgcctctaccgtccgtctcaagcagcaggggttgaccggaagcgctacctttatgcagggccgccgcctgcgcatccccgagctcgtcccgttccggctgacggccgacatcgtcgatgggctcggcatgtcgggcgtcgagggcgtctttcgtcgctgcgccgaggagacgatgcgggttatgcgcgactcggtcgagaccatcatgacggtcctcgaggtctgcaagcacgacccgatgcacaactggtgagcacggacaacgcaagccctttcaacacgggtgctgaactacctctcgaccgcatgacctgccttaggggcatcgacgccgacaagctcgcccgcatccagggccaggtcgatgtcgccgacaatccagacatcatccgggactcgaccgacgaggacgccgaccgggcgttgacgagcgtccgcagcaagctgtccaagacgctcagcgtcgagtacactgtcaacgacctgatccagcaggcacgcgaccccgtcaatctcggctccatcttcaccgggtgcgtccatgcggcgacaatcgaagccaacctgcttgctgacaacccacgactcacaccaggtggcaagcctggatgtgaacaactgaagggggggctcaccgacgcccccctgccgccgtttcctcctcgaatcgcaccggctgcgacagacctcgagtcagcttcattctcctggcaacgtttcgccgtgtccttgggtagccgtagcagctggcttagctgaaattgagtgcgtctgttcgttgcgctcgccttgcgcctctaccttcctgaccgttccttctttcctgtatcgctcgaccgccggcctccgtccagaatatcacgtagcccctcttcccctatgggaccatcaaccgacggacgagttccccccgtgtctgcatgccgcccgtcttctctagtcgccgtcgtcagcgcttcagccttcgttagctctggtcagccctcgtcccccttcgtctgcccacgtcagcctttccccttccccttccccttcgcccttcctctcgcccccctcttccctttcccttctgcgacgcagcacgtcgtccttctgctttgggcccttctgtcatgatccacatctcggtttgacggtcgcgcccttcagtgcgcgagcggtcactcgtcgccaccccagtagtcggcgatcgagatgccgagcccacggccgagcgccgacgcctcctcccatccgacgccggccttgagtaggaccgagtcaatcttttcttcgccggtcgcgctcgatggcagggccgttcgctggatcaggtgctggttggtaaggttcgtgagctgcgcaagggaagagggggacggtcaggacgggcgcgcacgcgcatggggccagagtgaacgagacgagacgtacgagcgaccggagcgacgccgagcccatcatcgacgagacctcgtcctcccaggtgtagttgcggccgccgccagatgtatccgagatggctagagtcagaggcggccgctcgtgctcgacgactagcgcgccccagacggcaagcacacgctcgaggccgaccgccttgggcccgatcagcgactggggcaccttggtcgccagcccggcgcccgacttggtgatggtgacgcgcttcttgcggacgccgccgcctttcgtgcgcgaggtcgtgtcatgcctcgcgcgcgaaaagagccggaggtcctttgacggcggcgcaaacgaggtgaggtaggacgccaggaggaggtatcgcccgtaacgcggcagcggcggcaggagcgcgagcgccggcagcgattgcggcagcggccgaaagtgctgcatcgcgttggctggcgccgcctggccgagcgggacgacggccttggcccggatcgcaaaggcctcgatcgaggttggcactcgggccgggtcctcgagcgcgacgcggaacgcatgtttgctccgggtgacgaggtcgaggacggacgtcttgccgccgctgacgggtacaaagaggccttcgtcgagctcgtccatcggcgggagcgagccgacgaggggcgcgatgtagattggccagagcgcgtgcgccagccggaggagcgtcagcggcgccgggtgcgagctgaaggcgagcgagagcagatgctggtgaaagggtgcgaggtggagcgcaaagggatgggacgccgggattggtgcgttggcggcgaggaaagaggatgtctctttaggcgggcaaggagaggaagttgaaaggtcagcacgggaccgttatggatctgcagagcggggcgaacgcacgagcctgcgagaaggccggaagcgagagatagaccgggtcggggaagctcgacgggatcgacctgacatagtcccacgggacggccgaaagaaagaggatcatgacgctcgcctggcgcgtcttgatgatcgaggaaggagcgaaaagggggcaagtcaatgcaggacagacgcgccgcgatgaggatcgctcaccatctcgcccaggccgagcaggaggccaccgaggccgccgggcgtgaacttaagcccttcggcgtggtcgatgatgaggaccctgctcgcgtgtcctttggcttggccgctgccatcgttcgctgccgagctcgagccgtcgccggccgctgcgatggcagagcgctcgagcgcgccgagcaggtgctcccagctgccgacgggccggccgtcgtcggtctggagcgcccactgacggtcgatgtcggcgagaaagccctttgggctcgggaactcgagcgtgtcaacgtaggcgtaggccgtcgacgggctgtaggtcgccaggtaggtcgagaggagcggctggaggtggccgtcggcgtgcgtccagaaggcctgagcagggaaggccgtctggccgagcaggtcgacgaggagcgagagcagtccgggcgggaatacgagcggcggcggtgctgacgaagagcttggcaaggccatcctgcgagctgagaggtaagagaggaggcgggctgttcgggtcgaggtcggtgtcgacgggcagcatggcgagtcccgtcgtcgaaacggccaccgcctctgcccggaccatcatcgcctcccttgcctcctgacagccagtaatttagcatggcacgccgcaagactggcttcctctcggacggcgagtcgtcgggcgactcgtccggggctgactcggacgtcgacggccagcgcaagcgccagaagcggtccaacaacggcaaggaggtcgccctctacggcgtcttcgccgaagacgacgacgacgacggcgggctcggcagccgccgcgagcgtggcaagcgggtcaacttcacgaggtacgtcagatccatgtagaacctttccttagctggcttgcaacctgaggtgctgatgcctcgagcctcgcctgctcgccgcctcctagagcacccgccttcacctcggcctcgacgtcgtcggcccttgccccccagccggtcgacaacctctcgggcgaacctgatcagcctgaggctgccgccgttggaaccagctcgatttctggcaagggcttccttggcagtgccggcgacatcgatgacggcgactcggaggacgacgacgacgtcggccaggccggcgacagtgactccagcagcgatgactctgagcggcgcccggcctcgcatcgggtccgagacgaaggcagcgacaatgagtacgacctgcctgccatgtcctcctttgcgaagggcaagggccgcgcgacggatggcgcaggcctgggtgtcactcctgccaccgccgacgcgctgcttgcatcaggtgcgcaaccgagcaccttgacggcgacccgtaaagcgggcttcttcgccccgcccatgctctcgagctcggcagccgcttcaggcccctcagaaggcctaccgtcagccttccagccgaaaccaaagcaggcgcggtccttcctgcccaaatcggccgccgccccgccgccaacgactgtcgccgccgccgacctttcgagggaggatctgcaagcgctcaacaagctccagggctcgttcggcgcgcgcatgctgtcgaagctcggctggtcggccggctctggtctaggcaaggagggcgagggcatcatcgccccgatcgacgtcaagctccggccacaaaagatgggtctcggcggcgtcaaggagcggaccgagcagagcatcaaggaggccatccggaagggcgacatgcccgcgcccgaggaaaagaagaagcctcaagcgaagggcggccgggggcggaagggcgctgggcgggatgcggacgaggacgaagcttcgtcggtccgagcgagcggcaccggcaccggcgccggcgccgaggagtggaagcggcgcaagaagctcaagaccaaggtcgtccacctgacgtacgaggagatcctcgagcagtctggcggcgccggcaccgtctcttctggcgctgggctcggcgtcatcatcgacgcgaccggagcaacggtgcgtatatctgtctctgagctgccgccgcgcgcatcctagctgatcaggaccgctcctcctcgaccgccagccgcgcgagatctcatcactctcgcactcgcagtactcgttcaactcgctaccgcagacgatttcacgtctgcccgagctccggcacaaccttcgcacgatcgcgagtcagaccgtcatggcgctcgaggcgctggcgaaggagggcatctcggtccgcgacaagagggtccggctcggcctggaagaggaagccctgaggcgacgactcgaggccgaagcagtccgtgagtgcccccttgtttcattgcaacctttcatccttgagaccggcgctgaccgtgcgacttcttcactacctgcagagatcgctcgcttgcaagcgctccagaccatgattgccgagatttccgagatttcgaaggccgagtcttcggttcaggccagcggatcggtcaatcctcgactcgaagctttcgaccccgtcgtcgaccgtcttgtgtttgagtttggcaacgagtttgaggcgctcggcctagatgaagtggtcgtcggagcgatcgcgccagctgtgagtctgccgaccctgagaagtcgccctcgtgtcgattgcgtgactctcactgacccgccgggtgttctgctcgcccaggtcaagcgtctgctcgtcgactggaggccactcgaagaggacggcattctatctgttctctggaagtggcgcaaggccttcaggctcgctgctgcgtcgaacgacgagggctcagtcgacgtctacggccggccctcgagccgcgagcgccaggccgagaaagatcgggagatgacgccgtacgagagcctgatctggaatgtttggctcccgcgcgttcggtcggcgatcaagtgagtgtttcgcgcttgccgcatttgccaccgcttgtagaggctgacagtttgctcctctgccgcgctcgcagtaacgactggttgccagctgaagcgtcgccggccatctacctctacacgacctggtcggctctcctgccgcagtttgtcaaggacaacatcctcgaccagctcatcctccccaagctgtcgaaggccgtcaacgagtggaagccgcgacgcgacgggaccggcccgacactcagctccctcgtcttcccttggttggaggtcctccaggccggtgcggccggcgagggcggccgcggcaaggaggtgcttgaggaaggcaagcgtcggatgcgcggtgtcgtgaagggctggcggatcggcgaggaaattccggccgagcttctagcgtggaagagggtacgtcgcgctcgttcatagaatccgttgtcgtcgtaggctgacgttcgttccctcctccctgccgctctcacttataggtcttctcgcgcagcgagtgggactcgctcctcctcaagtatgtcttgccaaagctgggctcgcacctccggacgcagctcgcaatcaacccgcgcgctcagtcgcttgccccgctcgaggaggccctcaagtggaaggacatcctgcgctcgagcatgctgagccacctgctcgaggaagagtttgttggcaaatggctcgacgtcctctacatctggctcgtatcgcccaagccaaactttgacgaggtcactcagtggtccgtccgcttgtcacttctacttcctgtttttcgactgactcgtgctccgtgtcttgttgcggccccaggtactcgtactggaagacggtcttcccggaggacgtgctcgcgctgaagggcgtccaagccggcttccggcgcggcctcgacctcatgaatcaggccatgtcgctcggctcgacggccgcgtcgcaactgccgcggccatctctcaccgcttcgccaccaagctcgccgcgctcgacgcaacggacgaacggcaacggcatcaagtcgcacgcccgccggccagatcgccaggaggaggaagaaattaccttccgctcgctcgccgaggcgtttgttaccgagcgcgacctcatttgggcgccaaccggccggtccgacgtcaacaccggccaggtcctcttccgcatctcgcgtgacggccgcactggaggtgtcgtcggctatgtcagccaagacgccttctacttgctccagggcggcagcggcagcggcatcgacggcgggccctcggtcggcaagcccgtcagcctcgacgaagtcgtacggcgagcgcagggcggcaagtagagcgcgggcattcggacggtccgggacaagctcgcagttcgaagggcattgcatggcgtggatttgacagaagggcccaaagcagaaggacgacgtgctgcgtcgcagaagggaaagggaagaggggggcgagaggaagggcgaaggggaaggggaagggggaaggctgacggcccaatcgtacgtcgcggttgtctgcccaccttttgtgacgcccgagctaatggcgtcgtctcttgtgcaggacgcgcgaccgctccggctcatctgtgacaatctcacatgggcaagccggatcctcgcagcgcacctacggcggcaaaggaagctttggcaagagcgccatcaccggcaaattcgacctccaggcctcgaaggacgcctacatgctggtctaccagcgccgacagcccgcaaacgccatggacgtcgagccaattctggctccggcctatgtccgcaaggagatcgagcgtcggaaccttagctggtcgacggcctgccagctgcgggagctcaagtgcgtcgccctctggcgctcatatcgccgtttatttctgctgacatcttctgtgctcgtcctcaaagggaggaggtcgccgccgaagccttcaacgaggttttggaggccaagaaggccgtctttgacaagtggcaggtcgacagctttgacgaagtgcgcgccctcgcttcctatctgtccgacctctggtccgccgctgatcattcggatctgtcacctcccctgcagcctgcctacgtcctggaagcggccgacctgaccggctgggttgaccagggcctttgggagaagccgccaaagaaggccgacggtaagaaggaaccgagcccgcccgacgagtcgaccaaggactgcaatggtacttgctgatagctgctcgaggtggaccgaaaggctgaactctcacccatcccttcaggctgctctgacccgtctaagtcggcctctgaaccgaccgtttccgttgacgtcggtgaccagctgttgaccgcgcctccggtcggcccgacggctcctgttagcgaacgcgacctcttctcgctcccgccagaggaagtgacgcccggccggcttgccgacgtcgctgctgtcgaggccgctcgtgaagcgttcaagcggcgtctccgggcgggcgcgctcgcgcggccacttggcgcgggcacattctgcgcgcacggcaagatcaagtcgctcttgcccgacgcgctgagcatcaagcgagtcagctctgtacgtctgtccagtttcaattcgatctcgccgccgctgatctggccatgctcgtctctgtctctagctggccgtcgaccggctcgtccgccttagttgcacgctcgagtcaggagtcgagcccatttccccggcgagcctctgcctcgagtgcacgcgcgagtactaccgcggtccgtccctccatcctcgttgtccgtttcgatgcgtgtgctgacatcgcccatcttgccaccgcccagccaaaacggcccggcggctgcacgaggggaacgtggccaccttcaaggaactcaacattgaccctcggcagggcttctgggtctccaaggtttggcaccgagactacaccacgcaccagacgaagagcccgatccaggctgccgacccgaccgaggacaagtaccaggccggtccgtcccctcctgctcttgcgatctcgattgcccccgttgcgcgctgacgacgattacttctcgttcaaaagacgtcttttgcgagcacggtggactcgcgactaaccgatcggcgcgtcggctgatcagcgcagacgtaagcctcgctttcgacctttggcctgccaccgcctgcgctcgctcacctctcctccttcttcctgccataggcgtttcacttcctgcagaccatcttcgaaggtctcgccgcgccggatcacgatgcaaaagagtgcgagacctgcactcttggtctgcggcccgagctcgagcaggccgaggaggagaaggtaagctgacacgacgcgctgtttcgtcagactttgcactgatgccgttccacgcttcgcagcggtcgctcaacaagctcctcaagcgttgcctcgaccacgccaagcacaaggagaagtcgctggtcctcggcgccctcgtcagtcgccgccggacgttgcgactatcgcgcgaatctagctgacttgcccggcccttctacccctcttattctgccaacaggcgatgatcgacaaggagttcttgctggtccgccctcagcgctttctctgtctcagcggcactggctcttggcgagcgactgactcacgacgacccgacgcctcccgcccggcaggcgtggtaccgctgggcgcagcggcccgcgagcgagctccgcccgacctcgatcgctacgcagcaatttgtctgccagcacgacaagctcatctttgactttgtggaccctcgcgactttgatgacgagagcttcgctctgatccgggtcgaggagtgggagaagctcgcagcaatgtgcgtctgtcgacctctagactctgtctctctcgatgctgaccgtttctgtcgaccgacagctacgaccatgggccggaaatactcgtcgagaatgacgagaccgaccggtggaacccgtggaaagtcagcaaaaagacgtgccagaagtgccgccgagccaggtgcgtcgtttcaaggcgctcatcgtaggctcgcctgatcaacctcttcctgcaggcttggcgacttgcccgagggtcccatcgacgtcgtcgtcgtcgattcgtggaaggagatcgcggcggtcaccgcggagttagccagccttgcccggacgaccgccgaccgctctggtggacgtaagtcgaagcgcaagcgtgcccacaagaagcacgagccagtcgaggtctttatccaacctggcgagacggtcaaagatgtcaaggttgcagtgcgtgacaaagcgctcagttgtgaacgccatcgtcagcaagtagctgacgaggagcacccgtttttctgccaggtcgccgaacgccttgatacaagcgtcctctacctgaccctttacaagggccacaaggagctcgacgacgcgtccaagtcgctccgaggtccgtcggcccgcacaacaatctgagacgcgtctgcggctgaactgactcatcaactgcacgcccgtgcagagcttggcatcgtcgtcggcgactgcctcttggtcgtccagcaggacgacgtcgatgaggacgaacaggagcggctcgcgatctctggcgtcagcgtcaaagtcccgcgccgctcggccgccgaccgcggcgccggctttggtggcacgctactctcgggcggtcacggcgctgcagctgtcccggcctcgtctggctccaaacccacgagtggctcgagctcgtcgaccatcaagtctgtctcgcctgaatccggtacgatcgcgggtcgctcgatggcagcgatcggggccgacatccaaagcggcgccaacgtcaccccggccgagatggaagcctactttctaagcctggcgagcgacggcccggccgaggctagcagcagcgcttgcccgacctgcagtgcgtttcgactctgccacctgtcccggcatgcgcgcgagctgacctccgccatctattgacgcctctgccagcgttcgccaacggtgcgtctctgtctgcttctgccctctcccgtatcgtccacaaaagctgaactcctcctgcacctctgcgacccgctcgttgacgcagagcttgacacggcctcctgcacaatgtgcgattcccaactgtgacccgcctgcccgccctctcttctcctttgacgactctttctttgaacgacccccttcacgccccatcacgccctcgccacccgtcttcgcctgttctgcgcatctgtcatgatctcacgagccccccacccgagcagtgatcgcgcacgatgcagccctcagtcccaggcccagaacggcagcgagccgacggcgacgctcagcagcagggcgctgacggtcgccaggagggtcggccgggccgcaccgctcgaggcgctctcgacgagattctccagtcctgcaacccattcgagcttctcgacccgaaggccgccgctcggctcggcgcgggcgctcagtgggcagactgacatgtcggtccacgactgccagagcgcgtcgatcttctgggccggcgtgggcgtcgaaagaccgggcatgtcgatgacgaggacccatagggcgtcgtagccgccggctgccgcagagttgaggaactgagcgtcagagtcacgcagcgctgctgctgctcaaaaggctttgcagacgcacctccagggacaccgcagccgaggacgccctcgctcgcgaggcatgcattgagaagcttcgtctgaccctcgggctcgattggcacgccggcgagctcgcccatgcccttcatcgccgcgcggatcatctgccgcggagatggggggctgtcagcgatcgggaacgtcggcggcagatttcggaagacgcactgcggtccgtgcccgaatcgtcttgagcaagtcgatcatcttcacgaggtgttctggtgcggctggctgaccctagtggcagagacgtgggttcatcagaaacgagcgtcggcctatcggcgcgaaggcaccagagcggcaagacaggctaagacgtacctttggtccggcaaaccaccggagggcgtcctcgtgaaagtcagggaacttctcggcaatgccctccaggaagtcgattttcgatgcgagttcctcgttgaggcgcgaaagcgtctgccagctcaggtcggctgcacacggtcgagggcggctgtcagctgggcgctttgcgcagcagagtgagcggtcgaagcgaaggacgaaccgacgtcgccgctctccttgcgccactggagcaccttgccgacgagtgacggcgtgtcggatccggcgtcgacgtcggcgagcatcagccgcgtgcgcggcggcagcgcgaacggcttgacctcgttggtccagcgcggattctccggctgcagtgctggcagaagggcagcgggaggctggtggcagcgactcagggaatggctcagtgggcgctctgtagcaaggaatgagcgtgaggacacggcagacgtaccgcgctctcgtccatgagctcctcgagcgcgtccgacccgaacttgcggtagatctggctgccccagactgcgctgctgacgtcgaacccgctgccgaccttaccctgggcgaggcagtggcagtactgggcgacgttgtggacgagcgccatgtcgctgttctcggccggcgctgcgacggaaccgaacgccgactctggcacggcgccgaggtgaaggagcagggccgagcagagcgacgtgatgagcgccgccgatgagccaagcccagtcttgtggacgtcggcgagcgtcgtgttggtcttggagaagggcgggagcaatggcaacgacttagtcgagagggggagtccgagcgcctcgagctgcgggagggagggaagcccgcgagctcgttcgtcaggctcgacgaccttgcgcttcacgacgagctgacctcgacacacacctgatcccgctgcgagtagaagtcgttgtcgccggcgatgatgatctccatgccgcttgaaagagcctgctggacgagcaactcgccgacgagctcgccggcgacgcggagcgtcttgtcgagcgcgatccggacgaacttgttgccctggcgctctttgccaggagcaaagacctcgacgagcgagccgtcagccagcagctggtacgtccactcggccgcgagaaattgcggcgaccggacaatgatcgtccccggcggctcattccagccgcctggagtgaggacagaggtgtagaagcgggagctggtcgagacgacgagcccgcggtaggccgggtcgagcacgaggtagccgccggcgagcaggaccttgcctggggccgagacggtcgttcgctcagacgaccgctgagagcgcgaagaggaggccatgctgagagggaagagaagggaaggatcgtcgtgacaggtcggaggcgctggacgcgacaggagctgcggtcgcgtcgaagcagctggcgtctgcgcagccagctgtcgggccacacgagtcgttcgctgggtctctcgtggcagttttgcggaggttctttgccagctgatcctcagcgtccatttgaatccaggtgtcctggtctgtcatcgccagatggtccagtctagtacccgcccgcaggccaccagccaagtagcgcacggcgcgacgccgccctctactcatcgtcgcctctactggcctcgcacgctgagctggaagacgtcgggccgcgagtagtggccggcgacatcgaggtcaaacttggcgcggacaatgtcgtcgaggtcaatctcggcgctcaggaccctgcgatgagaagcggcgccgactatcgtcagcctgaagatcatctcgaggacaatgaccgcgggcaagtatgccaatgacgcagcacagtgactcacccttccgagccacgcaagggccctgcgagcacgtcgccgaaaggcgagatgatgactgagccgccggcgatcatgacgccctccggatcgacctcgccgtcgatggcatggccctcattgtagtcctgcgagatggaggagagcgacgtcagactggcgctctcatccaaggcaatcagctgacactaccttctgctgtgcaaactggaagagaagtcgcaggacagtcagctccaagctcggcaaggcagtcggaacgccagtctcgcacctggcaggccgaaaggacgaagcaccggccttccatcgcgatgtggcgcatgctcgcgagccagccttcacgcccatcaaccgtcggtgcacagtagagctgcgtgccctggttgtagaagtgctgccggagcaagggcatgaggttttcccagcagacgccggccgatgcgagggcggtctcgctcgagcagccgagcgggaccttgacgaccgagagcgtcgactcgtcgccgaagccccagatgagtcgttcgctcgccgtcggcatcagctgtcaggagggaagcaaggagagtcagtttccccctgtcgaggtctctttaggccgacgcaccttccgccgcttgtagacgagcccgttggccgggctccaaaagccgaccgagcagtagagcgtgccgccgtccttctcaatgaggcccgatacgatgaagacgccgtgctcgcgcgcaatctgggcgacccggtcggtcgctaggccaggcacgcagatcgcagcgttgtggtaggcgaggaactcgtcccggccggcagctgacctcgtgccgacgacggcgccaaaggagctgaactttggatagccgccaatactacagagagaggtggccggggatgtcaggagcgcacgacttggttgccatgaggaaaccaacgacggacaaggcttctggaaagacgatgacctgcgagcggtcgcgctctttggcctgccggacgagccggtccatcttttcgagcgtcggttcgagctcgtagcgatgagtgcaggcctgagccaccgagacgacgagcttgaccatcttggccgcgactgtgaagaagaggctgggaggagggcctgaggacaggttggtgtcggcgtcaggcggagacgtgttcgccggctatcgccgagacgacggcctggattgccggcaggaaggaggttaacaggagagctcagctcaccgtcctgacggtcatctcgccccgacttgtacttccttaagctcgcctgctaccctctggaccgctaacctcggacggtcgctgtcttgtcgaaaggcagacaccctggcggcgatccctgagcccggccagctcggcccgactcgcccgcgacgccggcctctttgcttaccagctggctctgaggccttctgttgtaggcccagtgtggcaggaacctgtactgattccgtagctcgtccgtgtcggagatgatctggcaggtcggcacagccaggggtcgtcgcccatcgacaggcctcgagcgcgcatcgtccgccgggaggttcctcgtcaacggaccctccggccgtcggccccgccctctctcccgaccgagctgcgaccatgagacgactcgagctacaaacgcgcagaaggcgctcagagctcgcacgacgactggttcgtccatcccatcacctagatctgaccctggacgctgactgctgtcattagtcaagcttgcggccgagcgtgcgcgactgaaaccttgctcgtccgacctcgtcggccggggtcgcgtctctccccgcacgccaccacacggcacaccctaacaacagaggccggcgagattagaccccgtcgaaggaggaccgctcccttggatctggatcccccttgcagagaggtgagacatgattttggctgacgacgccgtgcggcccgatcctttgatgtggcacgccccgtctgactcgcgtggccgtcaggtgctgagatcatcccccaccccgccgagcttgcagccgcccggccaacacaagggccgctctcgttgcctcacgctttgccgggctggagtcttgtgcgctcatattccggtcggttccccccgtcgcagcaaggcaagcccggcgccctcgagctcaacctcaacctcctaccttcagcaagcccgtcgacagtgctagcaagagcagctcccggccccagaccgacaacaggcaaacgacggtggcaaccagctcccgctctcgcaccatcggacgaccagagccctttcgcggccagcgcgggctttctatagctctctgcctctgaggcaaacgcctccgtgtctgttccgccccgggcccaggatctacttccgtcgtgcgaccgtgtgctctcgccgcttcgctcctcctcggagacagactcgcacgtcaaacgaccaacgaccggcccacgcccagagtgtcgccctcttccttcgcaatcccctcccaaccaacgtccaccttgcacctctcgtccctcgtcgccctctccctacctcgaacgatgggctccatccagcggccagcggctaccaacacctacctcgcctcgccgcaagacgcgtaagtcctgcagccccgccccatggccgccgaagccggagccgccgaaagcaatcgagctgatcccgccctcacctgtcacctcgcgcccttcgcctttctttctcaccgacctcgcagactgctcgtcctcgaggccgtccggctcgaacgcctaccgcggacgacgcgcaggttgactcgctcagagcgcgatgctcttgtcgaggacggcacggtgcgtcgccgatcctctcgccgggctctaacgccgttaggagggctcgattcggtggctgatcggagtttccgcccgcttctcccgcttgcctgcctctcgttcaggtcttcgtctgggaggagcgtgcgtctcgacccttcattcccttcaagcccgcgctcgacatgctcgctgacatgtccctctttccctcaattgtcagaggagacccagatgcaggttcgtccggggccgacgcgtcgttcttggcacgcgacgcgcgactgaccgcgcgccgacctcctttcttcaccagcgatggaccgacggcaagcgctggtcgtgctcgcgcgtcatgggagagtttctcggctacgagcaggtcctgccgaacgagatcctgcctggcgtacgcatgaggtgcgctggctctctgcattgccgcgcctgtcgcccgatcgcctactgacatcctcggcttctttccgcctggtcgcctctgcagcagcagggccagccgtctcgagggcggcctgataaaacagacgtactcggccactcttctctcgtgcgttcagctcgtcgcccctgtccgtccgtttggccccacgcctgataaagccctactcctgtcttcccttcacccccgcagtgaggccgaaacctcggctaacaagtatcgtgagtaccggtcctccgttcaagcctcttttgtcctcggcccttcttgctcgggcgccacccgcacgcgattgcggtctctccccacactcttttctgcccgcgccgcaggctgtttgggctgttcatcgccggccggccggtttcagccccttggacctccctgtcatccctttcttcttcacatcggctactcacttgctccacagccccgggcgatcgcgtgggcttccctcgagcttttgagctcaaaaaggctgaccctgccgaccacgccgcgctcatcgccttccctcttccctcgtcgcccgccatgctagacatcatctcctaccaccgcgcccactcggtcgagggtttccaccggccgtcgcaccagcccttctacgcggacctcgagctctcgcgctggcgcacgacggccagccagggtcgaggccagtctccgcctgccaacgacggctcgtcgtcgtcgcaaagccggcgacaccgctccgacacgatccgcccgcctcagtcggcctcgtcggcaacaggccgcgactcgcgctcggtcagcggcgggagcgactcggacagtcgtccggcgtcagctttcaattaccagcagcagcgccagcagcagcacttgcaacagcagcagccgctgcagccttcgcaccatcaccagcctccgctgcagcactaccagtacgcctcgcgaggaccggcgcctgcccctgccccttacgcgccgaccgaccggccgctccaggcagggccgttcgccttccctccaccgtccggcctcggcgacggcggttccgaccctcggacgagctcggccctgcccgagtaccccggcgacccctaccgctaccacccttaccggccgccgtacggctcggccccgccgtctctgaaggccggcagctaccctccccggcgggtcatcagcccaacgccgtcgctcatcagcaacgcaaccactgactcgtcgcgctgctcgtcgcccaagacggcctcgtcctactcgtccgccggcccaggctcgcgacacggcagcggcggcggtggcagcggtcgactctggccgacgcccaggccgtcgccgattggcggccgagacgcacggtacgcgcccgctagcatcccggtcgtcgacttgctcctcccttcggccgcgatgccgacgacgacgtctccggtcgagatcaagccgccgaccgccctcgaggaccggccgccgacgggccacgcccggggctacctctggcagacgggcgcgcccgttcaggaccggtcgcgcgtccggctgacgctcgatccagaagatgagcgcatgttgagccggcttcagttccgcatctgatccgtctcatggtgagtggcggcaccttcgtaggctgggagcgagagccggcgctgacccctcatcctgtctcgtcgttgtagcagaccgcctcgcctttcaccctttgcagcagcagcgccgtgtcgctgtcacgcttcccctgctctcttcgatgcccagacccgctacccactgtatcactcttacccctgcccgctccgaggactcgctcgttctccattccgtcacgctcctcacttggctttgcttcgcacctttgcttttcaaccttacgctctcatgtacgatgtgatgcccatgcacgctcgctttgctcgccggacagcgactcgtctggtatgtcgcgaggctcgctccgttcgagtgaccggtcggcgtcggccggaatggcgttcagcccgagcggagcttctgcgccgactgccgatgattcatcgaacccgcggcccatcgcagcccactcaaaggccatcgtcagcgaccctacttgcacccgcccccgactaaccatcaccttcccccttcttgactactgccagcatgttctcctccatcacccgcaccaccttccgctcgcccgtcatcgcccgggcctacgccagcaagcccggcaggaagggcgtctttcaggccatgcgtcggtccccttcaggcgcccggcctccctccgatcgagattggccacacgagctgaccgctagcccttgcttccgatccgtttgcaggcgagaaggtcatgggcgccgccgaggtcgaggaggtcgacgttgccgccaaggtagactgtacgtcctcgtcgtctgcaaccgacagatgggctgcgcgcctcgttcaccatcactcgcccaagctcaactgctgacgcctcgatgtcgcccgatcgcgccctcttgcagccgtcaagcagactgcccagggcatggccgagggcatgcgccaggctgccggcgctcagaccgaatcaatggcccagaccggaggccaggtcaaggacgccctcatgggcgcggctgcgactgcctcgagcgtcgctggacgtacgtcctcctgcttgctgagtcaagcccgcttccagcgctgactatttcgcgcttttgctcgacaggcgtccttcccgacatggagaagcagcagccctcgcaggccgacgtccctcccgagctcaagtcggacccctacgctggtgagaagctcgacaaggagctccgcgcccagggcaaggatgtcggtacgaccggcaacacagccggctattcgggcaacctcgccactgccaacccccttgtcagcggcacgtctggtggtggcctcgacggcggcagcgcccgttaaggttcagacttcttccggccttctcgtcttgctgtagtctcccgagcctctctttgcttccgatctgtcctctcggtgcaccctgtatcatgaagaatctgctctttctccctatagcgcagtaaaacgttaggcagggtcataaagtacgtgatcgggtggctctaggaacgcctcctctcctcatccgttcatccactgcctcttggtcactcaacccttggacaagccgctgccgccgccacttgccctggctacgttgcctcgcgctcgctccaccacgagctcccgcaggaaggtgacgccttgccggagatcgcttgcctcgacctcgagctcgatcacgcgcgatgacaggtcagacaccgttcgctggaggttgaccgtgtgatgcttcttctttgctcggaatcgagcggctgaggatgcagaagaggggaacgtgagcggtgggacaacgcgagatggtgagcacgtgttacgcacaggcctcggtgttgcgccgccgcttgtcgtcctccactgcctcccggttggcgatctcgcccgggctatcgatctcaccgccgatgacgatgaccggcggggcgactggcggtggggcgtccgtaccgtcctcgcggctcgcaggggcgacactcaggcgccgactcgtccgctcgagttctctcgccgctggcagcgctcgcttccggccgcgcgaggaggttgagcggctgactagcgaagagtcgctgtttgctgaagacgggcccggggtcggagcggcggacgaggacgcgagcggaagaagtggcgagagagggctgtcgaccgtcgcttggcgtgggggagcaggttgctcgttgcgcgggaagaaggacgacgatggctaggacgatgtgctggactggactggcagtgggtcggcgccggccgcggcgaacggatcctgcaggtgcggcagttggacctcgcacgagtggtctatactctcgccgctgttgaacggtccgccaaggcccggcagctgaggaagatgcaggttggcgaaggcggtcggcgagaagctgaagttggacgacggccgtcgaccgatcgtctcgttcgccgctgggtggctggactcgtgaatcggcagagagagcggaccagtgaagtgggccggctcaggtggagggaagaaggacgagaggaaggacgagaggtggttggacgagtcgtcatgcgaggaaagcggctggacgtctggatgcggcgagggatggcgcgacgacccggccgaagcggcatcgaggtggggcgagtggagggccgacgagtgcgctgagggctgatggccgacgccggccggatggaagaggctgtggaagcgactgagcgcctcatgctgctcgctctggccgacgtgcggcaggagcggcgtagggttgtggccgacgccagacaggcctatcggcggggcgtcaaaggcaaacatctctggtccgatgggcattgctgctggataggccgccccgttgaccgctacggaggaaggccggctcgagtgcgcggacgacgacgacgaggcgagtggctgctggccgaagccgaccgacgggagtggctgaagttgctgctgccgctgctgggccattccagagaggaagctaagccattccgcttctccttcgggcggcgctgcaaagagaagggcggcgagcaggagggtcagcttgcagctccaagctcgtcgagctgctcgccagggccgctgagcacgcgaaggcgacgcaccagaggtcgaaccgaggttcgacggttccgaagccggctgactgctagccatcgagagacttgagccaaaggtcggcgagtgagcgtttgctctcttggcgaggagagagcgaggcgagcttcaatggcagagatgagcagagagacagcaggcagggcgtgcgatgagagccttcgcacgcggtcagcccggcggagaagacgtgctcgtgcgtcagtcgttcgcggtcaaatccgtctcgagcccgagccttagctgaggggcaaggccagcccgagcgcgacctccttggcccccgaggtcagcaaacggtcggacgaggcgaggtggacgtctggagggcgagatggacgtcggggcgagtcgctcgaagcgtcggcaccttggccaggcgactcttgccgacctctccgaattccctggccctcttctccgaattcctcttccgaaccaaacaaaggtgcttggaggttgctgcaaatcgcagcgaagacgcgcggaggcggagcttgcgcccgcccgacctcgcagcaattccgccttgcaagccatagataaaggagggagacgattactcctgagagggctgatgagcagcgcaggcctcgagctgattgtagagagggtggatcgccgggctgacagacgcgccgccctcgaggccaacgcgagaggctggcggcgcgacgttgtgcgtctgctccagatagcgaagacgtcctcatcgtcggtgccctcaggctacaaaggtggaaggcaaggaaggcgttctcagcggcgcgcatcaagtgccgcacgcagtacgagcatcgactgaccaaggtgttgaagacgtactcgagctcgacccgaagctcagccacctcgaggtcgagcggcaggtcattgtcgtccgttcctagcgagggaggacgataaccggtcagaaggtcccgacggtcgcccggcaagacaaaggaacgcaccaaaagggttctcgacttgggaagcgataccttcgacgcccatcaaagtgaaggcaacgagcgagacgacgctgaccatgagccagccctgcagaatgatttggagggtcactatcgaccaaatcgaaggaagatttgcgttgaggctgaccatgtcgtcgacgaggaccaggggcagcgagaagaggtagagagtgaccgactgcttcaggtggacctgagagggagcggatcgtcagtgttggcgcactaggccaggacatcatctagcgaagccgcacctggaagaccggagggagcggcgtgcgtacgacctgaggggaaaacaagtcgtcagcacctttcaagcgacgtgaacaggccaagccaacgcactcgttccatcgcgcccatctggtcgatcatcgtctggatcatgccctgcatcgcgttcaacccagcagggcctacaacggtcgaagaaaggggcaaaggatcagtcaacttagcctctgtcaagtggccacggctgacagagggtgacataccgatggcctcgagcgcgccctgcctgcggaaggtaaagagcgaccggctgaggtcgtgggcgatcacgagtggcagcggcaggctgacgccgccgctcgagttaaaaggtctgacggcatccatccattcgcttggctcgcgggtgcgaagaaacggcgtccgctcgtcggccacagacgagggcggcgcgccgctgagacgctggaagtgacgggctagaccgtgatgcttgcgcttcgggctgggaggtggcggctgcgattcgagctgtgagggctcgaggtcctgcgaggcatgaggaggcgggacggaaggtgaagatgacaaggcgcgataagtgtcgccaatcgtgtcgtagcgcgcaaagtcgggcggtaggacccctggagaatacgcgaccagcgtcaaccctcagcttcatgctccgcaacgcattgcactcacccctgtagtcctggtgcgacgtgccaggctcgcctcggaggtgatgtttgacagcgatgacaaaagcgttaacgagcctgaaaaagaaagaggtagccggcgtcaagtaaaagttgtcgacgtcaagatcgagaacaaagaggacccacttgatgaaacggatcttctccttcttgagcacctctgctgtcgtgcgctctcgagagccgacttgcttgttcttgtcttcattgctactggcgaggtcgcggtcctggacgaaggcttccgacggcagctcaacttggatccagacgagacgcgagagattgcgcgcggccgagacgagagcggtgaagtctttgcgacctctgcacgggtttcagatagccagctagggtatcagcagcgagagctaccacgagcggatcttggatgcgaaggccgcactcggagtaccgctcgtaggcgctgccgttgcggaagacgagaaggaggccgacgacgaccgagaggagcgggacgacgctgttgctgagatggaggggaaggccatagaagcgagtggcagaggctacaagtgcgagtgattgacgccgagagccgacgacaggtcagctctcatcgtccggcgcaagcgggaaggccagcgacaaaagtcggagacctaagcgtcagacgcaccgacaaagatcgcccagagcgtgacggtcaggacagggccaatgatatgcgggacaatggagcctcggatgagctacggatgggagggtcgtccagaggatgagctgtctctcgggcgacgagtggcgggcattgacggaatggaaggcgagcttgagcacacgcacaatgacgtccggcagccacgacaccgaggcgatcgtccgcttcttggcgagagcctcccgctcctggatgagggcctgcgagtagttagaggatggaaaagattcagccgagctgcgggctcagggaggcgagatcaaggtggaacggacggcaagggctgtcaaagggcgtggcgcgctcgagtcctcgctttcgtcgcgtgaaagaccggaggcgcggcctgcaggcagaaagatcgaggcgagcgtgccgagtgtacgtcgtctcatgactggctgacagtgatcggagggagggtggcctgggcttgggctgctcgtctggagcgatgggctgaagccactcgtccagcgcctggctgcgtcggccggcgcgcgcgcccgttcgccgcctagaaaaggggtcagcaatcggcacctgcgagtcgctaaagcgtttcagcctcgagccgatcgatgactctggcgagagagctcgacctgtcgtccctccttcgcaccaactccttctcctcctcccgtttcacctctcagtcatgtcttctttcggcacagtctaccgcgtccacacctacggcgagtcgcactgcgcctcggtcggcggtatcgtcgacggcatcccgccggtgcgtctctcttgccgtcgacgcttctcggccggtctggccgacggcgggcctccctcctttcgagctggtcggctcgcccgacctcaccatgccgtctcttgcagacatgggctgacttgacgctcttctcactccttcagggtctgcccctctcaaacgagatgatccagaagcagcttgctcggcggcggcccggccagagcgacctctcgacgcccgtgcatcagacctgcttccgcggcccactggcttgccgcttctccttgtcttgacgctgactcccttccttcacactctcgtagcgcaacgagtacgacgaggtcacgatccagtcgggcgtcgagaacggcgtcacgctcggcacaccgatcggcttcctcgtccgcaacaaggaccagcgcccgcacgactacgccgagaccgacctctacccgcggccgtcgcatgccgactggacttacctcgccaagtacggcatcaaggccagcagcggtggcgggcgctcgtccgctcgcgagaccatcagtgtgtgactttgctcgagctcgtccgccttggcaagcagctgctcacttgctcgcatgccttctccccttcgcgcaggccgtgtcgctgccggtgccatcgccgaggagtacctgacggccgcgcacggcatccagattgtcgctttcgtctcgggcgtcggtaatatacacctgccttcgtttgacgccgacacggacgagccgctcaacccggccttcatggagctcctcaagacggtttcgcgcgagcaggtcgacaaggagctcacgcggtgccctgacgcccagatctccgccacgatggctgacgttcgttccgtatcgctctctgccgtcatacatcgagctcactaacctctgcttcgcctctctcagcgcattcgcaaggccaaggccgatatggactcgctcggcggcaccgtgacgtgcgtcatccggggcgtgcccgccggcctcggcgagccctgcttcgacaagatggaggccctgctcgcgcacgcgatgctctccatcccttcgaccaaggccttcgagttcggctcgggcttccgcggaaccgaggtccccggcagccggcacaacgacatgtttgcccgcggcgaagacggcatgctcaagacgatcaccaactggtcgggcggagtccagggtggcatcaccaacggcgaggacatctacttccggtgcgccatgagccgggcgccccgccgcaaagagccgcaggctacgatgagagcactgacctactccttcccgcctctcagtgttggcttcaagccgccggcgaccatctcgcaggcccagcagacggccaagtacgacggcaccgccggtgttctcgaggccaagggccgtcacgacccttgcgtcgtcccgcggtacgccctctgctctagccttctcgtccgattcgctactgaccttctggcaaccgttccttcttatgatctagcgccgtccctattgtcgaggccatggcggcctgcgctgtcctcgacgccatcatgatccaggcctcgcgctcggcgacggccaacctgctcccgcccatcacgacgctcccgccgacgatggtgaggccgcctctccgcttcgaagccgttggcgcagaccgagcgctgacgaccttttctcaatcgctcaggtcatgcctggcatgggccggcactctggccctggcagcaagggcccgatgggtgacgagtaaaggcgcagaggggagagaggccgtcggcgcctgtgagccgaaaaaaggcgggcctcgccggtcgccgccgcgtccgaggtccctatccctccttcctctagacggctcctcttcctcgcagggaggagcagctcgtgtgtcccgtccgagtagtcggtcgatagattcttaaaaatgcttgtatggaccttgtcgcaacgaaacacgagtgccggagccttcggccgtctgggatcggggccttcggcgcttgcggcgtctgccgcgctctccacacgagccagagacgaaagctgctgctgctgcctctgctctcgccatcatcgctacctcaccttacctggtgcgacagacactcctctcctctctcgtcctcactccccttgcacggcagctgcttgtcggatctcggccgcacataacaacaaggtgcgtctatacgccgcggctcggggctcggagctcgacgaagagctcgcgcgcgatccagccttctcggcactggctcgtcggaggtgtcgcctgtgaacctcggactcgtgggcctcagagacggagagctctgctgacttcgcagaggacaggactcctcgctgacctcttgccctgtgtgctccttcgctgcctgccattcggctcgtcgtcgttgctgcagctcgtctccgccagccccgacgtcgatccccgccgcctgccaaaagttcgcccctgggccctcgtccctctcgtgctctccctctcctcatcgcctggtccgatcaagccgatctcaagccggacgccctcgccgctctcctctccagcttcccgcccttgtccgaagcctgagccatgtctggatcagaacacgccggtgcgtcatccgagctcgtctaccctttttcccaggccgcgcacgcgcttgccaaggcagcttaggggtcgtgcgcttcatcgcccgtccttggtcgctgacctgcaggcactcttggtccccctatccagtcgagttcgagtatgaggccctgccggtcggtaccggcctcggcgtcaacatgctcgcgggcgcgctcgtgcgtgcctatccaccgctcctggcgagctgcacagcagctcccctaccgaggccagctcgtgccgggacgccctgctgactgctcgacggtcttcatgcactgtctccttccaggccggcatctcggagcacgccgtcatgtttcccatcgactcgataaaagtgcgttcgcgccctccgagcagcggctcgcgagctctcaagcttgcgtcgccctaccagcttctgctgacgacaacgcctttgcccttcctctcccagacgcggatgcaggtcattccgataacgccaacctcagcctacaacacgctttactcgtccctgacgcgggttgcgacgaccgacggcctgcggacactttggaagggcgtcaactcggtcatcatgggcgccggcccggctcatgccgtctactttggcacgtacgagattgtcaaggacctcgcgggcggcaatcgaccaggacaccagtttgcggcgactggtgagtgcttttggacggcggggtggcggctgcgcgagctggccggcgacgcagagagctgctgcggcacggcagcctgtcgacccgagctgatcatgtgctttcgacttttctcgtcagccctcggaggagcggccgcgacgattgcgtcggacgcgctcatgaacccctttgatgtcattaagcagcggatgcagctgcgcaactcgcagtacgcgagcgtctcgtccgccttcaagacggtctaccggaccgagggcctcggcgctttttacgtgtcgtacccgacgacgctcatgatgacgatcccgttcacggccgtgcaattcacggcctacgagtacctcaaggacgtcatcaacccgaacggcacctactcgccgacgacgcacatcatcgccggcggtgcggccggcgccgtcgctgcggccgtcagcacaccactagacgtcatgaagacgctgtacgtggcgatatcgtcttctgacagagtcctcaatctctgatcgactctctgcccttcccggttaccaggcttcagacgcgcggaacgtcgacggacgaccgcatacggcgagccaacggtgtgaccgaggcgttcaagatcatctgggagcgccagggcgcgcgcggcttcctgcgcggcctgacgccgcgcgtcgtcacttacgtgccgagcaacgcgctctcctggctggcgtacgaggtacttgacgcttgctgaccatccactgttcgtctgcacactgacgagattgtcaacctcccgctccccaccaacagtcctttcagttcttcctgcgcacaaagccggacgacgtcgtgtagaagcgcatcgacgacccagccgcccgacaggctctttcgcagcctcatagacgccccccccccttggcttgctcgccgtcgctccttcataccccgcgcgctcctcggaacccccccgaaggatcccgacctcggagcgacggcaaacagcatcgacctatctccttttctctcccactcgcaccaccttttgcttgccctctccccgcccgtcgctcgcccttggaccggccatgctgcaatcggctggacgcggtgctggtggtggtggatgtggcgctcgcgatcgatggcgacggcctcctcgttgtgtacatgcgagatgaccgtctcctgggtgacggcgttgccaatctcgctgatgacctcggtcgtagcctcctgcaaatttgggagacaaggtcagccggctgccagggcctacccgacgtcgtcgccaaaaggcgccagagactcgccttatcgtgcttgtgcaggaaagtctgaagacagcgatgagccgggagcaggcgaacgtcagcgtcagcgtcagacccgcggtagcaggaggagggatacgcaccttgacggcctccattgtgatggtgtgttgctaagggggattcaagggtaagggtgaggaggggcgggaggagctggtagagtgggcgagatgtggttgatgaggacaaggctcgctcctgcttcgacgcgaccctttgtacgacgcccagacgatttcaatcccgtcgcgtcatccctgaccctgcgctgctgtgccctgcctctggttgcacggctgcaggccaggggaggcgggcaggcaggtcgggcccaggcctcggtccctgaacatggtggggcgcagagggaaccaggtcccggcctctcgagtccaggccctattattgcaaccctccgaccgagaggcagcagctccaacagactcctcctcctcctccgcacgaccccgcagcctcgcgggaccatgtaaggcaagcgacgtagccgaggccaagagaggcaggggtcgggcgaacatactggtcggcgtcggaggttcgaccggagctggccgcacgatcgatgacgcggtcgagttcgcagcgcgcctctccgcgcgcgcctccatcaactcaggacgctctgcctccgtctgagtgggcggtcgctgtactcgagaggcgtttcaaaattggaaggacgcgagagacacgggattaaggccgccgagggaggaggaaggaggcaagacaggacggacacggcgacggagggctgcagtacgtaaggagaacatgggcgagagagaggggatcgagcgaagcggctgatccattttttcttcttctgccgaggagaggaaacgggggttcggtaacaacgggttgggaggaacagtagtcgacagagggaagcggagcgagcagagatgttgtttgagcgggcaagagagggacggcgtttacttgccaaagatgcgcttgaccgagccaaagatcgagctcttgcgcttgctgatcttggcctcctcagcggccgtcttcttggccggcgccggcttggcgggcgagccggtcggggtcgagttcgagctcgggtagccgccaggaatggtcgacgcgtccttggccggaacggcgggcgcagcggcggcgggggcggcagccgcggcggctggagcagcagcagcagcaacggccggggcggcggcagtaggagcggcggctgccggagtgggcgcgaccggggcggcagcagccggactggcagcggcagccttcttagcggccagctcctgccgggcagcctcgagggccggcgcgccatcgcgctcaaccttctttgggtccgtcaccggaacgtctttgctggcggcagtcggggccgaagcagcaggggcctgggtgcccgaggtcgtcagcgtcgaagcgagcgagccgccggtcgccgtcgtcgccgggagcgaggagaagtcgatcgggggcgcgatgaagactggcttggaggcggcggcggtggcggtcgagtgggcttcggaggcggcggcgagagcgaccggggtggcggtcgtcgggttggcggcgtccttgagggtgacggggtgagcgatcgggagcgaaccctcagccgcagggttcgccgcgccgtccttgagcgtaaccgggtgggcgatggggagcgacgagccggccgaaggggcgtctaccaacggaccgaaaagacgacctcagcttgcgtgcgcgtcgcggcgccggtcctgaagcggaccgagcgctcaaagaggttggtggacgaggggcagtgggagggggacgaacgggcagaaggggccgaccggacggcgtcgacgacggatacgcccgcagacgacggggccaacgagaggttggggtgcaggttgctgccgtcgacctgctcaagggccttggtctggccagcggcgaagccggcagcggtgccagagtgggcgtcggcggccgagccgtggccgaagacgaggccctggacgccggcgacgaggccggtgaggccgaccgaagcctgctgggcgaggtgctgagcctgttgctgggcctgctcggcaaggcgctgggcctcgtgctgggcctgctcggcgtagtgcgaggcctgctcgagaccctggtgggcgagcttctcggcctcctcctggaggtgagcggccttctcggtaagctgggcctgaacattctcggccttgacggcatcgacgtcggtcagcggctcaagcgcattcttgatcggcttggcggccgtcgtcgtcggcgcggcagcgggagtagcggcggcacgggaggcgtcggtcgaggacgagctggcaatctgctgagcgacggtgagaccaccgtcggccttgggggcggcagcgccgacaggcggctgctcagcggcggcggcggcagacagaggagccatggcgagaccgtcggcagcccggaccgatcgcgtcgacgagaggtcgctgtcgatcgtgtgcggcgcgaccgtgtcattgactgagggcgtgctcgacttggcaagcgagtcggcaccggtggcctcgtcaatggctgtcgttacagcagacatgctgcgtcagcccaggctaaatcggcatcgagcgcgagattcgagcggtcgcacccttagagacctcctccttgcgggcggtgatgtcctcgggccgggcaccgctgccgtggggcacgatcgtctctttgtcctcagccttatttccagcaacggcggccgtggcggcagcagcagcgccggcaccggcgacagcgctagccggggcaatgacggtcgccgcgggcaggtcgaccgcgggcttgtcggtcggcttcggcgtcggctcctcgacgtgggccggcgcgggaggggcgcggacgacattgttcatgttgccggcagagtctatcagagggtagtagagaagccgcttagagtcagggctctgcccgcgacgtcgccagcgaaagatgttaacgtaccccactccttgtcctggtcttcacgggcctgccacgctggaagagagggccagatgatgatcagcgcgtatctcacacacggcttatccgagagagaggaaactcactgccatcgacgactgaggacggacgtgtttgcgcacgaggcaggaatgttcagtcagccactgcggcacgcgttgctcttcacgtcgaacggcccgacgcaccatacttgtactcgtacgtctgtccccactcgagctcgattgatccctcgaagccctcgccgaccttggtgagcggatgcgtgttgccggaccactggttgggtcgggaaacaggcgtcagtaggcggaggaggcgcgtgtcacgggctcggtcgagctatccaggcaatcgacgagccggcggagagagtcaagcacgcacagagtcgaacgtgccggtgacaatgaccgagtgaggggcggcgctcggcctggatgaccggcgggaggagtaaaaggggttcgggagcaagggggagcgaagaggggtgaggggagagaaggcgagcaaagtgagtctcagcctctgcgcacgtcacaggcgaagcccatccgggtcaagccgctcagggccggcagccagacagccaggaggaggaaaaggatggacggaccaggtgaactttgcttcgtactttgcgctaggcatggttgtgggaggttggaggattgagggcggatgggtgtttaggcgtcggctcggctgaagcctgctccttctcctttgcggccgcacgcggcggggcggctcagggccgcagcgaggccttttggatttttctgcgcgagacgatttggaccgcagccgcaccctcctcctgttgcgcccgaccagccatcagctacagcaacactcccttggccagccatgtcgacgccgaccgcgctcaagctcctgacgctcctcaacgtgacggccgcccggccgccgccgtccaacaagcggtcgatgccgtactgctcgtccgacgacgatgagccgccggtcgctgccgccgccgccgccgccgccgccgcctcgaaggcttcctccaaggcgagcccgtcgtcggctggcaagaaggccaagaagacgcgtcgcatcgtctggaacgacgacctcgagcaagggccgagcggcagtggccggccgacgtcaagcggcgcatcgtctggcggaggcgcgagtggcagcagcacgccgtcggcgacgaccgctgcgccggcggctgccacggccaaggcggccggcaagggcaagaagggcaagcaggtcaaggttgagggcccagacagctcagacgatgaggccgggaccggaggaggtgcgtcatttcgcgagccgtacagctgagcctgttccaccatgaccgccgctgacctgcgaaactccgctttctcgctgcacttgctgagctcagacggcccaacgaccaactcgatgacgaccgacgccttccacacgcactttgggccgtcgcctgcgccgctcacaagcagcactacctcgtcgcttgaggcgggcaagtgggtcagctcgcgctcgacccggccagggctcggcaaggtcgtgtccgtcctgcccgagggtgcgccggcgctcgcgcccgacgctccggtcgagccgccgcaggtcaagctggtcgagagcgtctacgagcagttcggccggctgccggcgaccaaggccaacggcgggcagatgacggctctccaggagggcgtccactcggtcgtcggccagtaccaggacctgttcctcagccggctcggcgtcgaccagcgcgctgaggtcaaagacgtcgtcctcatgcatgccgtcaaccacgtcctcaagacgcggcgccggatcctcaagatgaatgagaagttggctcatgccgctgcggccgcgagcgagccctcttcgacgacgacggcgacgccggccgagctcgacgcccgcgaccagggcttcacgcggccgaagattctcctcctgacacccttccgatcatccgccctcgccgccctgacgagcatgctcgccctcttcccggccgggacccagatcgagaaccgccagcgcttcctcgacgagttttcgctccctccggggacggccgaccggctgctcgaccgcgcgggggagtggccgcgcgaccacgtcgagacgtttgcgggcaacgtcgacgacaacttccgggtcggcgtcaaggtgacgcgcaagagcgtcaagctctttggcggcttttacggctgcgacattgtcgtcggctcgccgctcggtcttcgcatgagcatcgagaaggagaagtgcgtcgcaccttcctctcgtcgtcgcgcgcagcgtcggtcctgacgcctctgtctccctttttcaggagctccgactttctctcgagtattgaagtggtcatcgccgacggcctcgacgtaatgtctatgcagaattgggaccacgtccaggtacgtccctcgatacaccctgctcgaggatcgttgtcactgaccggtcgcgctcatctcactcctctcggcagttcatctttggcaagctcaatgcgctgccggccgacgcgcacggctgtgacttctcgcgcgttaagccgtggtatctcgacggccaggccgcactcgtccggcagacggtcctcctctctgcctacgagacgcccgagatgcgggcgctgtttaataaggacctccggaacgtcggcggcaaggtccggaccgagggcacctacgagggcgagcttgacaaggtccggcggggcgttcggcaggtgcgtcattcagttgccgatcgagagccgacatcgcaactcgcactaatgtcgagcctttgtcacccgcagaccttctcccgtttcgaggcgtcgtcgccgctggccgagcccgatgtccgcctggcccacttcaccgagaagctcatgccgacggtcctcaagtcggcgagcatgcgcgagcgcacactcgtcgtcgtcccgtcctactttgacttcgtccgcgtccaggcttggttccgccagcagggatcaatctcgtttgcctccatctccgagtgcgtgcgcctgatcaggctcgcgtcctttgcgcgccgggagctgagcctctttcgcctttcttcctcaggtattcgtcgagccaagagatctcgcgcgcgcggacgtccttcttcaagggctcgaagaagttcctgcttgtgaccgagcgcttccacttctaccggcgctaccggctccgtggcgcgcggacgatccttttctacggcctgcccgagcacgccctcttctacccggagctcatcggctgcagcttcctcaagcggaccgacgccggcgcactcaccgagaaggacgacgacgaggtcgaggtcgacgccgaggacgtccaggtcaaggcactattcagccggtgggactggatgcggctcgagcgcgtcgtcggctcggccaacgggcgcaagatgctcgacgtccagggcggcgagagcgtctttagctttgtctgagtcgatcttgatgagacgtgcccgtcgcaagcttttcgtcccaggtgaggtgagacgagacgagccgagtgcaagtggacaagaaagaggagtcgcgtgccgacgacgagcattccgcctgggaacctcctttgcttgatcagctgcctccgcgacattgagccgccacgcgctacgacgagaaagacacaggaagcaaccgccagcggccacccagcaccctggcgtcttcgcccagcctagccatgtcgattcccaagctggcagatgatgcgtcgcctagccaggccctcggtcacctgctcaaggtactcggcccgctcttcaagcttccgacgcgcaaggcggctgccgctggtccggccggctcgacgccgacgagggccgctctcgaggccttcctggaggccatacccgaggctgctatagcactgcctgacctcgttccggcagaggaggggactgagggtccgaccgggcaggagctgtcggtcgctcggcagcgtgtgctcgcgaaggcgggcggcaggctcgcgctctgggccgtcggtcgcgtcgacgacctcatccgggcggacgaggcgcaggcgcctgctggcggttcgtccgcgagctgctgaggtggcatcaggtacgtcgctcgtgctgacggcagatgttcctttttgctgcggcagctcccccggcctatccggtctcgacggcgccgctcctcatgctgctcctcgcgcgtgcgaccggccagtacctccagccgctcttcgtcggttgcgcgccggctgtctctgccgtcaagctcgcgccgacaaaggccacccagcgcttcaccgaactcccggacgaggatgaggataccgctcgagactcctcgtcggccgcccctcaagcgctctccgcgcgcagcgagctcgtcgacgccgttcaccaggtgctcgccctggccagccgccagcctttcacgctcgtcactcagctcgtacgcgacgtcggtgtcatgcggcccgtcctcaagattgccgtctcactcggctggcagtccgaccgcgaggatcagacgctgcagacgacagtcgtcagcttgctcgacttgttcgtactttgaccaagtgcccggcccctgccgccctctcgactgaccaggttactcggtcgcctcatgaacaggtatcatccctcgcagaccatgtcgctcttgacgccacttctcgcacggtcatcgggcgcctcggtccccatctcgcgcctgctttcgcgtgcgctcctccgaccagacggtttgcgcgggctcctgcagtccatgttcgcggtcgcggcttcagccgatactcaagagcctgaaggcatgaggcgagcggaagcctgggcgaagctggtcgcgtcacctcctagcggcaaggcgccagccgaggcggtcgcctacgttcggacgatcgtcccccgcctgctagacctgctcaaggcgactgacacgccgacggccttcgcgagaccggtagcgcttgctttgacgcgcctcatccggtcgcatccgcccctcgtcctcgtccaccttcacggacccttcattcggtccaacctcgacttgacggcccgccggcagtgcgctgctgctgcaaaggccgacgagcgaggcggagatgcaccgtcgtccgcgcaattcgaggccctttgcgtgattgtcccgctcgttctcaacgcacccccctcgtcgaccatcgccgaccggctcctcacgcctatcatgcctccgctgctcgcccttgactggcacctccgcacagtcaagacggccgacccgatccttcgcgctcatgtccgcgacctttgcgcgacttggggtcggactgccaacgagcgtgacgtcgaagacgtccttcgtcgagcggtctttggcgggaggggatggcggacggagggcttgccggtgaagtcgctccacgagggacccgtgcctgccaacatcctcggcggtgacgacgacgcagccgacgacggtgaggctgagtggcattgggtgggcggcgggcaggacctcgccgtacgcttcgggctgcctccccagcccgacctttcgacggcatcggaaccgtctccactagctggtccgagctccgcgccaggcggcgggcctccggcaacggaaacggacgaagccgacacgttcgagcgcgaggcgctcgccatgctcgatctccagcctccgccagccctcttcgtcgacttcctcaaaacaatcaagcgcccaaagccgaccggcgcgctcttcatcgggctgctcggccgtctccatcgaccgaccgacgacgagacctccgccctgggtccgctcggcgagctgctcctgtccaagctgacgctcaggatggtcgaaatcctcggcgaggacctcatcaaaggcgaggccgaacggatcctcgagtctgtcaatctcgtccttcgctcatccggcggtcctccagatgctcggccgacgcggacagcgccggctcgtgatgccccgtattcgtcattcggcctggcggacctgcgcatcgtcgaggacgagccaatcgaccgggacgatggcggtggcgagacgttcgatagcaacgacgaactcgacagcgatgacgagccggatctgccgccgctggaggatagcgaggctgtcggcctcgacgacggccgcgatgcgtcaggcacggccgagggtaagatgggcatcgtcggcactgccgtcgggcttcttattgcggtcctccaaggtgagtgcacttgtgtagccaatcgatgtgcctcctgacgagcttcacggccgtgttgacgctgacttcgccttctcgttgctttgccgaaacgcagctgacggagcactgtcgcccgtctccaacccgctcatcgtggtcatcaaggcgtcgctcgagcggcatgtcgcctcgtccaccctgccggccgtgcgacacctctgcaaggaggcccttctaattctgtcgcttcgctcggcggcatcgtccttgcacggtctcggcggcccatcgactcccaggtcggcgcaggacggcactgccgccgcgctcgagcgctaccaggaggcgctgcggctcatcgccgacccgagcgttccggtcagggctcacggtctcatcctcctgcgccagctcgtcctgccgtcggcgcaacagcagcgtgagcggccatctgccgccccgagcgcccgactacccgacgccctcatcccggccatcgccgatgtctttgtccaatcgattcaggactcggactcgtacgtctacctgaatgcggtcaagggtctcgccggcatggtcgacggccacgggcgcgacgtcctcggcaggctcacggacgtctacatcaagggcgtcggctccaacgtctggaccggcaggagcaaccccgcggatgtcaagggaaagggccgcgcgactggccggagcatcatcggcgagatcggcgagatggacgccaaggacctcgacacccgcctccgcgtcggcgaagcgctctgcggcgtcatcgagcgctgcgatcgcgcactcggccagtacggtgcgcattctctctgctgcggattttccgcagcgaggctacgctgaccccagcctggcgcgacccttcacaggcgacgtccttatcccgcctatgctgctcgtcttccgggcggcgcggctgccgacctcccttcgcgcgtcggccttctcagtcctgacgctcatcgccgagacgtcgcccctcacgttcttgacgtacctcaacaacctcgtcctcgcaagcgtcgacctcctccaggtcgagacggtcgctcgaccccggtcgatggcgccggcaggcaaaaccgacccttccgcccggcgagaaggcggcgaggtcgacagcgacgatgaggccgaccaagtgaacctcccgctagaggatcggccagcgaccgtcgccgacgcgaagcacccgatgctgcgccggacggcgctcaagttcctcggtgcggcgcttgtcgccgactcgcagctcgatcgggcagaggtcgaccgcgctacctggggtcgggtcagcacggtcgtcggatacgtccgggcgaccgacattgacccgcacgtccggtctatcgcaggcgaggtcggcatcctgctgaaggagcggctgctggctctggcaacgtaacgtgatggtgaagtcgagatcgtcttttgttgagagggaaggtggagtacatgggatggaggaaaaggctgtcgccgaacgtctcagttaccgacctcgcgccagccgccgcgctggcgctcgacgaggtcccagcgcacatcgcactcttgcaggacgtcctcgaccttgcggagcgtcacaaagtgccagcggtcttcgtcggcggcttgtagacgccggtgtagcgtttcggacgaagccccgaagggtgccggcttgccgttgtccagcacggtcgagccagaccgtttgggcagccgcgcgttctcgactgcaagaagatgcagcaaaagcggcgccagggtcggggcacagatgaaaaggtagcagtcgtcgcgcttgatggagccgacagctggcgtcaaccgtcgagagggcgaccagctagatgcagtgggaggcggctgcgaggctgacgtccaaggctcgggcggaacgcggaccacctcgccttcgcggtcgagctcgacgaggcactgcttcaggaggttgcgcactttgcccgcaacccagtcgacattccggagcttcttggtcaggctcggctcgcgctccttcattaccttgacgcggtgcgaggcctcgtcgaccaggtccaccgcttcgtgaccgatgccgtcctcgtcgtagaaccagcgttcatcgcgcgagaccttcttgcggagcttggccgcgtcagccttggctgaacgatgcccggctttaagtgcggctcggcgctcctcctccttctcgcgcgtcatccgcttaagcaccttctcgccgtagatgcgcaggctcggaacgtgccggaagtggctgatggtgaaaggcggtgcaggaggcgccgaagacgacggatgggccgacgatagcagtggcgtattgaggatgccggcgaagagaacgctcgtatccatctgggccgaagcgaaagagcggccgacggagacgtcgaatgaggacgagaagttggcctcgagctcctcgtcatcctcgccagatgcccggcccttgcccttccactggctggacccctgaccctcagagccattcagctctgggagccaacgcacgaccggcggagtgtcggaccgatcggcgagaccacgcatgccccagacgtcgtgcgtcgtgtcaaacatgtactccttgagccggagcttgaggccgctgatgtcgcagctggcagacgaaatcttgttgggatcggtggatttcgatgagcgtccgaattgagactacagcagaaggtcaggcgcggtcagatgcccagttcagccttcgggtcgagatgcgctgcaggttgagacgcaccggacggaactttgtcggcgttgcggccgaggttgaagaagcctggctactcgaaggtaggtccgagaagtcgagctctgagctgaagcccttgccgctctgattagctggactagaggaagaagggatctttgatgcgcgcttcgagggcatgtgtggcaggccgcgagaggacggcgcgagaggagcaagcttccgaggcgccagagaggaggcaaggtaggcggcctggtcaaaggccggatagacctggctggtcagggtttcgacgagcttgatgtgcttcgactcgtcgttaaacgtcactgggactataagaagcggccaaagccacgtcagcggcagctcagccaggcgacagcgccccgtgcgcaggcggaagacgactaacgagggtcggactcgagaaagaactggaggttggcgccccacttcttgacttttggccgaatgcggaccgtgtcgccgactgcgacccgggggacatgctcgtacggcgggaggtcgacaggcgcaggccgcttgcgaaacgcactgccgtaggtcggcggtggcgacggcggttgctgcgctcggtgctctgcgacacgctgagcggcctggaacgactggaagacgttgtgatcaaagacagtgtcgagcgtcttcgatgagccgtcgtcgactgtgcatgagatgcacaaggcgtcggcatcagggctgaagctcagcagatggaaaggcccggccgcctacgcaccgaggaacgtcgtcctgttctcgcgaacgtcgatgccgacgacgagtccaacgatctcgacccgccggcaagggaaggtgtcaaggtagaatacgtccgctgagcagcagagaaggatgtcagcccagatgcaatcggctgacggcagatgacggtcgagcacgcaccgtcctcctggcgcagcgacctcgcctgctcgatagagcatcgcgcgacagcctcgtctcttagcagccactgtcttagagcatacggctcgccctcggcaattcgctcacgcttgagctgtgaccgttgcggcttctcgtctcgctgaggctctgccgcgtcggacgaccggtgcggcagctcgggctgggaagcggccgggcggaaggtgggtgcgcccttgaaatagaccgagggcggcgacgacgacggcggcatgcgggcggtgttgggctgatagatgtcgcggaggaccatcctcgcccgagacgtgctgtgtgacctgtgaagagaatgccggtcgagtcgagttgtcgttcagaggcaacttcgaggttggctcgacttgaagccgccttctcgagagcacgcgcctgatcttcgcccgtcactcaaccgtcagctcgcaatccaactcactcagccatcgtcagccctcgcttcggactgtctcgacgacagaagaggagcaagcaggctcggcgctctcgttaggacaacggcttgccaccctcgtcatggcatcctctcgccccacgactgcccgcagcacctcagctgccggccctgcaacggcggcaacagccgtcggctcgcccgcttccgctcggcaggccatccgcattggtgcgtcttgcgtgtgtactctaacagtagaacgtacaggtcgctgacatgcgttggctgtctcgctcagcttgccgggtgcggcccttccttccgcacgagctgtcggccatgctggcgccgcccgaggcggacgacatcgagtgctcggaccacacgatcagcgtcctccacaaggcggccaagcacaagtaccagttctcgtcggtccatggtcccgaggcgagccagaaggacgtctttgcggccgatgtcgcgcccttgtgtgtcgctctggtgtatcaggtaggcctcctgaaccttcctcctcaagcctgacgacccctttcccgaccttcggcgcccgcaggcttgactcggtctaccaaggcgtctcctcaaccatcttcagctacggtatgaccggctccggcaagacgtacacgatgtcgggcgacccgcgctcggcggccgacatgggcatcatcccgagggccgtcaaagcgctctttctgaagcgggcgcggctgcgcaaggccgtcatctcgatttctgtagagtatctcgaaatctacaaggacgaatgctttgatcttctcgtggcccgggtgcgtgctctggatcacggcaccacaacggtcgagcggcgctgaccctctactgctctcctcctgttgcagacgaacaagccgaaggcgctcgacatccggacgaatgacgtcggtgccaacgttgtcgccggtctcgttcgtgtaagtgaagctgggcaagcgagcgcttagaggtaccctctgacgcccgtcgtccctcgtgcaatcgcgcagatcgaggtcgcgagcccacaggagttcgaggagctgtacgctaaagcttcggcccaccgccgcaccgaaaagacgctgctgaacgagaagtcgtctcggtcgcacgccgttctctcgatccacgtccgtacagaagaggccaaagaaggtggcaagagtgagttgtcgtcggctccagcagcctcgaccctggctcggcttggcagctgacgctttgcctcggcccgatgccagtttggaccggcaagatcaacctgatcgacctcgccggcagcgagaacaacaagctgacgggcaacgaccgcgagcggctggccgagtcgagcgcgatcaacaagagcctgacgacgctcggcaacgtcattgacgcgctgaacaagggcaaccagcgcgtgccgtaccgcgacagcaagctcacgcgggttctcgcaggtgagttagcacgtagaaccctgcttttagtcgctctcgctccagtgctgagcagcaatctgttctcttagacacgctcggcggcagctcggtcggcctgctcatctgcggcatctgtcctcacccgtcgttccgtcaggacacgatcaacaccctcaagtgcgctcgctggtcccttgctaattcagccacagaagactgacacctagcgtccttcaccagcttcgccatccggacgaaggaggtagagaaccgagtgacagtggatgaacgcgactaccgcccaccggcgccaaagccccactttgcctcgctctccaaggcgactcatctggctgcaccgctcacacgcccgtcaacggctatcggcaccgtcaggcctgtggtcgttccacttgtcgccaagaagcccctcgccgctgccggccgcgtctttggcaccgacctcaaaaacgtcgcgcccgagaaccggccacgaacggtcacgggcggcaagccaggcatcgtcatcgggcgtggccggctggccgtgacgaaggtgtcggcgaagggcaaggagcgccaggttgaagaggtcgacgtcgaggcccttgtgcgttactccccacgcgagccggcttttcaccgacgcagaactgatcttgattcttctgtcgcaggtcaaggccaaggtcgccgaggagctcgagcgccagatggccgaattcaagcggacgcttcaggcgagcgccaatgattcgcttgtcgcgccgaaggacgacgtgctcgacgcccgcatcgagtaccttgagagggccgtgtgcgtcaatcgaacacaaagagccccttctttcatgtcgctgaccttgagggctttgatctgtctgcttcacagcaaagctcaggtcgaaaagtcgacggcggaggacatgctcgaccatgcgcggcgacaccacgaccgcgcctttagccaggacgaccggtacgtttatcgcgggcagcccttccgcgactgacagctgatcctcgagcttaccgagcagggtccaactcgagatggcgctgtcattttatcagcaggcgctgtcttacatgccgggcaagaagacgatcatgacccggtgcgtcctgcttgacaggggatcccgcagcgcaagcgacaactgacgtctgttccccgcgattgacctcgcagcatccacgacatccagcaggcgatcatgctcggcctacccgtccctcctcggaagggggcgccaagggtcgacaccctcctcgtcgaccagcccgcggccgggcccagccgaccgccgtccgctctcggcggcctggcggtcgacgccggtcgcgcaaagacgctgcctcggtcgtacaaggcgcccggaacgaccagcgccgcttctgcgccgagcaagaaggccggcagcgcgctcaacatctttgccgacccgaccattgtccggccgaaggaccttgacgcaatcgacatcatcccgcttccgacaccgccgtcgatccctcccgtgacgaagcccaaggccaagccgagcaggaaggcgactgtcattcgtcgaccgccgacgccggctcgcacgtccgaggatgacgaggacggcctcgagactcctgccgaggtcgtgcctgttcggcctgaaccagccaaaaggcaaagggcgacgagggcggcaaccgtccggagcacgaggagcgtctacaaggaggcgatcgactcgagcgagaacgacgacctcggcggcctcaacgacgacgccgaatgggtgccgacgtagcgctgggcattgcgaggctgtcggttggcatgtgggctgaggttgacggtcggcggccggagggcgctgttggacgatgaccctgctgcaacgacaaacggccgatgctaaccgtccggcaagctgtcgttgccgccgtcttggcttgcctgtcgtcggatcggctcgagcagttgccgaatcgtcgccgctttggccgagcgctttcttccgcggggccgccccgagcgaggcggcggcgtaccttgcagccagcttgccccagcgagcactgcttcgacctccttaccactaccacctctccctcttggacgaccccttcttaggacccgcaacgatactcgccttcactctttctacccgctccgtcctgatctccgccgcccttagaccgtccgccgccgccgccgcctccgcccgctcactcctgtgccgcccgccgcacgcgtcgaccccctcgatcctcctcgcccgcgccatgtcgtcctcgtcgtcaaagaccaacggctccagcaagaaggagactgtctgcatcgtcggctctggcaactggtgcgtcgaaagcgtcgacgtcgaccggccaggcgaggctcatgagaggcatagctgctgccgctggccgatgatctcatccctcccgaatgccggcggcacctgctgacgcctcttctgatcctcgccacttcttcctcaggggctctgccatcgcccggcttgccggcatgaacgccaagcggcactctgaccagtttgaggagcgcgtcgccatgtgggtctttgaggaggactttgagggccagaagctcaccgaggtcatcaactcgacgcacgagaacaagaagtacctgcccgacgtcaagctgccagagaacgtcgttgccgtgcccgacctcgtcgaggccgtcaagggcgcgacggctatcgtctttgtcatgccgcatcaggtccgtcgcgccttcaactgtcgcacgcctgagctgcactgaccttgcgctctgcctgccgccaatcgtcgaaccccgcctctgcctccgccagttcctcggcaagctgatgcaccagctcaagggcaagattccggagggcgtcaaggccgtgtcggcaatcaaggtcactgcctcctgcctctgcacggagggtcaaacggaaggctgacgccggccgagctgcgctgcgctatcagggcgtcgacgtcaagggatccgatattcagatcttcgccgatgtcatcgagaaggagcttggcgtcaggtgggtcgtcgcctgcgactactcaggtccggttcaagcgactgacttgcctgcctcctgcgtccccagctgctctgcactgaggtgcgtcgcgcgtacacttcgacggagcttgacctccggccgtgctgacctgttctctatcgttagcggtgccaacattgctggcgagggtacatcgatcttggtctacgctcctctctgtctttcgttgccgttgttgctgaccttgcgactctcgcgtcttcagtcgcccgtgaccgcttctccggtgcgctcgtgcgcaggccttcagtccttccagatggctcggctgaccttttgactctgatttatctggtgcagagacgacgatcggctatcggaccgaggaggagggcaagctctggcagcagctcttcacgaccgacaactttcgcgtccagatcatcgacgacgtcgccggcgtcagcctgtgcggtgcgctcaagagtgagttccgctcttggcctgctcgtttcttcctatctgctgaccatcctcatcttcgatacttgcagacgtgagcggtatcctcgactgtggcagcgctcaccttctgcccctactgacctcttccctccggatagattgtcgcggtcgccgccggctttgttgacggcctggagtggggaggtgcgacctaagcaacgcgcctcgtcgtcgtcttaaagcccgagctgacctctcgatccctcccgctcgcagacaacaccaaggcggccatcatgcggattggcctcctcgagatgaagaacttctgcaacgccttcttcaaggacgtcaacgacaagtcgttcctcgaggagagctcgggcgttgccgacctgatcacgacctgtacgtgcggctgcgaccttggcaggaggcccgctcggctgacaaacctgtccgggcgcatctgctaggcctcggtggccgaaaccgcaagtgtgccgaggcgttcgtcaagactggcaagccgtttgaggagctcgaaaaggacatgctgaacggccagagtacgtccagaccgacttcctgaaggtcctgtaacagagtgttgacgaacaggggccccctttctcagagctccagggcatctacactgccaaggagatccacaccttcctccaggagaagggccacgtcgaggattacccgctcttcaaggcggtgcgttcgcgcacggccgttggtgctgcagggagttccctcgctgatctctttgtactgtccattcgcgccggcaggtctacgagatctcgttcgagggtcgcaaggttgagaccctgaccgacggcctttaaagggccggccttgctccatcttcgcccgcttcccggttgtttgcacttttgttcatcgcacaccgcgtccgatagagacgctctcgtcgccagatcactgctcgcccaccttagagcgcgatgccatgtactttccctcctgagcattccattcaggccgagcgcgtccgtctgtcaccggttgcttggacgacccggcggccgagtttcgccgcgtcacccgctgggctcgatcgcaactcgcccgctcagcccagctttcgccccgtgccgtcggctgccctccgacaccatctcacttcttccttccatctcttctccagcctcaacatgtcgctcgcctcgctcaagcccaacctcaagacttcccagatcgccagcggccgcaagtatgagtacctcgacgtcgccgccgctggcgagaagaccaagggcacgctcctcctcctccacggcttccctgactcctggtgcgtgcggcccctgctgccctgccggcagtgtctcaactcagcggctggctcccgggatagcttacaggaccatagctggccagcttacactctcgttacactctcgttacacggacaggttcggctggagaaagcagatccaaccgtgggccaaccgcgggtaccgcatcatcgccccgagcgccctcggctacggcggaaccgtgcgccctcgaaggaattgcccggcacctctgcgaagctgatcaagctgtgaccgtccgccatctaaacaggacaagccgaccgacccggctgagtacacctggaagaagctgacggacgacatcgacgccctgctcgacgtcgtcctcggcaaggacgagaaggtcttcatcgtctcgcacgactggggcgcgttcaccggctggcgcttcactcagtggcacggcgaccgcgtcaaggccttctgctcgtgcgtgccagattctatagctggcctccaactggcaactgatcacgcgcctctgctctctgtcgtagggtctcgatccctttcatcccagcacccgcgcgcgacgcgccctactacccgatcgagatcgtcgcccagaaggttccggccctgagctaccaggttggtgatctcttctccccgtctgaggctgcgacgacagccttgctgacgtcgtctgcccgctgttgcaggtctacttcaacgagccgaccgccgctcaggacctcgacgacaacgtgagtgcacgacacagatgacccctgatcccttcaactgatcgaccgacgctgactgctttaccggtggttcactccccaaccttccagcgcgagcgcttcctcgacatcctctaccagacgcccgagaacctcatgaaggccggcctcggccagcccggaggtcagtcatctttcgatagcgccattgtctgcgcctttgctgacatcatagcgcgcgattcccaggctttaagaaggccgtccagggatccgacccggtcgaggagagccccttctggaacgacgaggtgcgagactctgaccgatgcttcgcgccaccgtcctcgtctctgatcgccctcatcccatccgatcatctaggagcgcgcattctacaacgactacttcaggacgaacggcttcaaggcccctctgcagttctaccagtcgaacaagcgtgcgtcctggtctttgcgttcgtctcgcgactgttgacaaaggacgctgacggaatacacacccgccctactcgcagccaagcacgaggaggagacgatgacaccgcccccggacctgcccgagggcgtgccaaagctcttcgtccacccgacgtacgactcggtcgcgatcccagacctcgttgagaagacgggcaagatccccaacacgacaatcgtccgggtcgagaaggccggccactggctgctccagggcccagaggcggccgaggtcgagagcaaggtcggcgactggctcgacagtgtcgctgccggtgccaagctctgagcgcttgtgcgcgcgcgaggagggcgatctcgtatgatctcgatactttcaacagaggctgatggttcggcagggcaggctagcacagcatgctcatcaggcgcaaaagaggtcgaggaggcgtcgtcgccctctgatctctacttacaagtcggcaactgcttgacacggctcgggtgcttggccccggctttgaagacctcgcagaggaggctccgccaagggatcaacgcctcgtaatcatagctgtctgcttgtgctcgaggccgtccatctgcgtcaggtttctacgtcggtcagctctgctcacgaaaccgctaccgagaagtccctgccctgacgcaacttggggcccttgcagtcgatgatctccttctgccccgccatacccccggactatgtcgcccgtctcctctcagcccttgatacatacaccggccccggccactccaagcatacccctttcctctctgtcccgctatctgcctgcttctgtctcccagcgattacaagaatgttctttgaacaaaggacggcagaagctctgagccgatctgcggtctcgagcaccgctcaatggcacacaaatgaggccctcgcctccagacggtccacctccttcgaagaatgacggcaacgagccgactcgacaagcgtcttctgacagaatcatggctatagtgtgggacctgcgagcgcatcggcggcgacatcccggccgggcagctccctgcccttcaggacctcgcgcacctcatctgcgctgagtgtctcgtaccggatgagggcgtcggccagctggcgggtgcggatgagagcgcggggacgttagtattgcacgcaagccgtcagaaagtggacgttacggcacgtacgaggtcgagctttgcccggttggtcgtcaggaggtcccatgcccgcttggcgccatcctcgatcaagctgtgtcgtcgcgaatcaaaggggagaagaacaatcagcgttcgcgcgcgcagaaaacttgtcaagggcagatgcactgacgaccggatctcgctttcgatctcgtcctttttgcgctccgagaggtagaccgactcttcgccgtggctgacgaggccgaccttctcgctgaagcccatctccttgaccatggcactcgcgacgttggtggcggcgacgaggtcgctgtgcgcgcccgacgtgacgttgtcggtcccgtagatgagctcctcggcgacccggccgcccatggcgacgtcgatccgggcgaggtactcctttttcgagtacgagtccttgtcggcctcgggcagctggaacgtgatgccgagcgcctgtccacgagggaggacggtgaccttatggagcggcatcgcgccctcggtcaagatcgcgacgagcgcgtgcccgccctcgtggaaggccgtcatccgcttggcctcaggcgtaacaaagtggctcttgcgctcggcgcccatcatgatgcggtcctttgcccactcaaagtcgagcagcgagacggcctgagcccggtcgcgcgacgccttgaccgcagcctggttgacgaggttggcgagctcggcgccagacatgccgggcgtcccgcgggcaatgatcgacgggtcgacctcgggcgcaaccgtgatgtccttgatgtagtgcttcaggatctcgacccggccgcgaacatctgggagagagggcgacgtgccggtcaggacgcaactcgagcgagtcttgagcaaacgcccgctagctgaatgtaccagggagggggacgttgacatgccggtcaaagcgaccaggacggacgagggcagggtcgagcgattgggggaagttggtggcgctagagcagcaaaggaaacgaagggggtcagacgtcgcgctacgccaagcccctttgcaatccgactgacgcgatgacaataatcccggtcgaggcctggaagccgtcgagctcggtcaggagctggttgacggtctgcttgagcgcagcctggtccttgttcgaccgcttgccgccgaccgagtcgagctcgtcgataaagatgatggccggcgactttttcttggccgccgcaaagagctcacggatccgcttggcgccgacgccgacaaacctgcaaaggtagacgtggtcagcggctttttccaagagtcctggagctgacagcagacgcacatctcctcgaactcggaccccgaggcaaagaagaagggcacaccggcctcgcctgcgacggcccgggcgagcatcgtctttccggttccaggcgggccggttagaagcacgcccttgggcagtcgaccaccgagcgtcgaaaagcgggtcgggtccttgactgcaaccgacggggacggtgtgtcagcggcagtacatggtgaagatgagggagcctcagccgacgcacggaactcgacgatctcctgaagctcgtccttggcctcctcgcagcccttgacatcgtcgaatttgacgaccttgccgccgtccttcgtgctttcaaactcgttgacactcggcccgagcttaaccgtaccagcttgctccatgacgagaacggcgatggtcgcgaagcctgcaggcacggagggaaggctttcagcggaagcactcataggcgacttggaactgtcgacaagcgacgacgcaccaaaccacttgatgcccgtgccgacagcgtaccaaaacgaccggccggtgaaccagccgtccttcttctcgtcaacgacgacgtgcacaggctccgcagccttgccgccctggccggacgacagcagccgtgctgatccgccctctgcgggtggcgtgtagatcggcccgttactgctgccgccgagggctgaaccggcagcgccagccgagccgaacggcgacgaagccgaagccggcgcggccgagtgccgctggagcagatcgtccctaatcttgatcgccttgttgacactctggctctcgccgaggaggacgagcgcctggatgtacagcgcaaagatcgagggcgagtggaagaggtcctttgacgggtcctgcagggagagagtaggtcgagcgaagcgggtcagccctgagtcgagaaggctgcagcatcgagacgatgacgctcttcatggcgcaagggccagcagcgtggccggccgctcaagacgacctctgcaggagaagacgcacccagccgccaagacgctcccagtgatcgacgatgagcccggcgccctccctccggacggcggcgtcgggctcgctgctgctgtcgaggatctcgcggaagagaccctcggcccggtcgacatcttcctcccggccgacggctgcccgctgcgagagctcagctagctcagacgtccaggcggcgacgggaccctcctcgagcgcggcggtcgagtcggcgtgttcggtgccggtcgaggtagaggcgtcgtcggcagccggtcgcttcgtaaagattgagccaagcgagagctggcgcgcctgtaaaaccgagacagatggcgttctagtgcgagagctagagggtaggctacagctgccggtggcccggcaagtcgaggcgaaggccgccgagcgagcgacgaagggcgaggggtgcgaggccgatgcagcagaggccagcagtcggcgagccggccgagaggacggccgtccgatggccttcatgcgagcggcttcgaaacgagattgagaggtctatcggtccagtaggcggagcagctaggtctagcagactcgtcaagagtagtgtagagggaggcgaagatggtcgttgcgagcagacagcggacgacctcatcgggctgctgccacgccttgctgccctccgcgcacttcagcccacgccgcgcggccgaaagccagggggctgacgacacgtaatcgcccagactgcgcgtccttctactctcataccaaggcgccgagtcggcagctgacgctggggactgagttccatcgtggacacccttctcggcgatctgatggcagctgggcggccatgaatcaccactcgacgcgcagcggacccgtgccggcggtcggtcggcgactaagggcgcctggcccatgggcttggtgagccgggaaagaggaaaggaggtggcagccggtgcacgagtgttccgtgcggacgagtgcgtggtcgagctcgagtcgagattgagagccaaaggcaaagaggcggcgctgtcggagggtggccctcgtgtagatggacgctgccggctcgctcgacgctggcggcggcggcggaggaggcacgaccgcgctcccgcaatagatcggccccctcgcgccggcgctagagcttgctgacctgctggaggactttggaccaggccggaagagcggtaagctcgccccaccagcgcgcgacgtttgggagcgagccatcggtcagagctggaagcacgccgaagtcgacgagcgccttgccgtttggcagatgccagaggtcagccggcgatatttcgtcacctgcaagatactatagacgtggttcgaggctgtcagcctcgggcgggtgagagaagactttgcgctggacgacccaccttcgactggccaagcagacgctcataacctgccagcttccggtgcaggttggcggtatgcgaggcgagcaccgcctcgtcaggcggaccgaggcctatccacttcttgatgacccgctcgaagcagatcgcgaaggctgaagagtcaaagttggaggcgtggaccgaggctgcctgatcccaaagcgccgcctgcagtcgaggccgagcgcgatggtcgtcagcgtcgtagctgcagcaccggcgcttcaggttcaagcgtacctggataagctcggtaggccacaggcccttcttggccaggaggtagcgggcgatagctctcgactcgtacaggacgagctcgccgtcgttgaggtacggcagctgacggaagggatgcgtgtcctcgaagcctgaggcggtcggttacgcaggtcagaactgagatctaggaggtccagggcaagcttcagccgaccctcgtcccgcgtagtcttgacaggggtgatctggcggcagaggaggatgcaagcagaggttaaaaggctgtcgggaaggggtgaacaggggacgacgagctcggccgatcgcacctggtagacgtagtcgcggccatcaacgagaccgaaatgctgcgccgtgacgaggacgagctgggtgtacgtcgaggagttgaatccaaagagattcgggactgtcattgggctcggtcgaagaggaacttgcgatggggatgctggcgattcaaggtcaaggtcgcgagggtcggcaacgcgcagggccggcaaccgccgacgcagcgccgcgcagcagactcagccctgcgtgcccccctacagtgcgcagagactcataagaggagtggcccctcgggcaggtaaagtggctgaattgatccggctggctgcagaggagaaggaacatcatatacgcgcccggcgactggatcagacgacaagcccgtcgatgacctcgtcgagagtctcctcctcgaggcggagcagcgcattgttgttcttgcggaggccataatcgccgccgttgcccttgccgtagaggcctcaggggatgaggttcatgaactcgggcccgccgccggccttgaaagcggcgaagccaaagtcgcgcatgtcggtcaggggcttatgagtgacgaccaagctctcgccggttgccttttcgagtgcggccagaatctcgttctgcgttgccacgatcgactgaacgtggatgaagcggttggacgtctctgacggccggctgaggtcgccgacgacagagttggcgaccgtggcgtacgccgtgaacgttgcatggacgtcgccctcgtcaaagactgtcgccttacagccggcgacgtcgaagcccaagaagcctgtcgagaggccgctgcgaaggaaagtgtaacaaaattcagcgcgtacttgggataggggccaagacggagggactgacaagtcgacatacgccctggtgaagattggggtccatgacaggcctttcttctcctccttccgaaggtggtcgatcacttgcgtcttgccgccgaggattgggactgccttgagcacggccgggttggcaatatctaacccaaagtcgctggagacgaagcgcttgacgcccgcctcgacggccgcgtcaacgatccgcgtctgctcgccgatggccgtcatcgtgacggtcgagtcgacggcgtcggcctcggcgtctttgaaggcctgagcgagcgaggacagggtgtgatccgtcttgacgacgcgaatgccggcggggaaagtcgccttcgacgacgcgcgagagaagaccgtcacggtgaagagctcagacgcgagcagggccgagagaatgggtgcgccgatgttgccggagccctgtcgccgacaaggaagggtaaaagaggatgagcggtagcttccgcctcgatcaggcgaaggcgactcacgccgagcaggacatcgttcttgatggacatacttgtggaagtgagcgtttggaagagaaggaggaacagctgggtgagggggattgaagggtgatggagagataaatggcctactccggtagcccgctcctcttgtacccctcgccctctccctcccgccctctccctcccgccttcacctcccggaacctgactgtcagtctatcagcgagtcgccatgcttgctcagctgcatagctaagagtacaagctcgtcaaccgacgcgccatcgagacaatcgggtaaggccgtggccaagagggggcttgaaaccccaagtaccctgactcgagctctgtttggtcgaggcgcaggcgagcgcgacaagcaaaggtcgaaagtcgccgcacaagtctttgtcgccggtggtagctgccgcaggtcgagcgacaggcggtcacaacgagcagggcggctgtcggcattgaagtggtggccaggcgtcagtctgcctcagcgtcggccccgttacctttcgcgtcgcgtcgcccttctgttctcctgtcgtcaccccaccatcgatcacaggcctatcaaacgaagaccgcaccaggtgccgtcctgctcgagcgctcgcaaaccgtttgcagaaccgaaagcaagcattgccagaggcagtaagcgggcagagatagaagggcaaagcgagcggccaggcgagcgggcgtgcggacgacggcagaagaagcgaccgtgcaagtcgggtcaatctggtcaaagcgagctcgtgcgagcgctcagagattgatgttgtacctatcgagcagaaggtcgttagcgaagagtgaaggcggcggaaaggtgcaagcgtgactcactcgtactcgtcccctccaagctgggcgacccacagcacgacggcgccgagcatgatgccggcgttccagatgacgttttggacgccccaggcgatgccttcgtcgtgtggcggccgggcgacgaggaggtacttgatgacgagagtcgtctgtcatgagggccagcgtgaggcgacaggtgaggaggaaggggagcaggtagagcacaggcgtcagcactctgtccgatcagggaggggactgcgcctctggtctcggcgatccggaatggggaccacgagctgtgcgtcgtcgtccaggcgggaaggggaggggctgcctcggcgggatccgggctcccccagcgagcgcaaaggcccctccctcgacccctggaccgtcgacggcatccaaaggttgtcggcgatgccctcgtccccggatcccaacctgagcttacgcgacgaccgagcgcggcaggcaggagaactcacgatcgacccagccaagccgcccgcgagcagtgcaaacccgcagaagaggacgagccgggcgcgccaggccgtcgttgacgagccgtcggcgtagccgtcggacgaaaggtgggccttgtcgatcaggttaacgatgaggaagccgactgcggagagggtgaggaacagagagtgaggcggcaagagggggtgtgaccaatcggcgagcgaagacaccgatggagtcgtccagccgagaagggagatgagagcgagcgatgattggagcaggaggaagagcaagcgatggcccgtcagctgccagtcagaggagaagcgacaccgagctcggcaggcggagagacggacgagttgcgatcagcccggtcgaccagtctgcgaagctgacgtagggcccgacgccgccatgactctcgtcgtcgccaccaccgccggcggccgccctccggtgcttggtcgacatgatgacggcgtcgacaaaggcccaccagccgagggcaaagagcccgccggcgaggtggacgaggagcgcgcgcttgtgcttgccgagcgagaggcgcgacgagaggaaggctgggagcgggaggacgaagagccggagcggatcgtacggcctgcgaggaagcgagctcgagctggaggtggccatcgtgaagggctgtgggacggatgacaagagagggagggtgctggagggcgaggcagcaggagcgagcgacgagtcgagatggccgtcgaggggggggaggctgctgacgggccgagttagggttatcgaccctccgcagcagccagcctgcgagcgagggacggctgacgccgcgttccctccgaccgaacccccgtcagctctccctcaacacgagcaccttccatcgccacagctcttaagccagaacagaatccgtcgttgacctcttccggctctcatcgaataaccatcaccaccattacaccctccagccgcctgctcatcgcagcagcgaccaccctcctcgcagccctcctcgcagccctcatcctctgtccgtccttcgtcccttcaatcatcgctgttgctgcctgtctctcaactgatgccccttaccgcctgagatgacagccaaccgtacgccagccctcatgtccggtccagcagcaacgaccgctctcgccagcgccatctcgcgcaacccctcgctcaagctggtcccccgactctccgagacccgcggcaaggccgaccatggctggctcaagtccttcttcagcttcagctttgccaactactacgatccaaagttcagtgctttcgggcctctccgcgtcatcaacgaagaccgggtcacgcccggccaaggcttcggggctcacacgcacgccgagttcgagatcttcagcgtcggtcgcctcttttcgccctcctgcccttactctcctcctgacgctaatccggatctatccttacttacgtctgcccgcagtggatcgtcagcggcgagctctcgcaccgcgacagcatgggcaacgaggaggtcctgactgccggcgacctccaaatgacctcggccggaaccggcattcggcacagcgagtacaatcgacacgcgagcaagccggtccacttcctccaggtgcatttgctcttccattcagtccgtcgtccagccgatgtctgacaacggcgcatcgctcgtctcacacgtccgctgccagatctgggcactcccgaacgagtcgcgtctcaagccgtcctacacgacgcgccacttcccgcgctcggcccgaatcaacacgcttgttcccgtcgtcgcccctatcaactcgtcggcggccgtctcggctcagcgcgaggcggcgggcccggcgccggtccattccgacctgcacctgttcgcgacggtgctggagccgggcaaggaggtcgggcatgtcttcaagcaggcgctgaagggtggtaagccgcggcgggcatacgtccacgtcgtgagttctcgcatttcgctagcgcacctcttctcgctgcgcattcttgaccctcgctgaccgcccacccttcctcctcactccttgtccgctctccagatccagacgacccgctacaacaccggcgcctccctctctggcccctcggccggccgagtcatcctcaacgacgagcttgaactcggcgaaggcgatggcgccttcgtcgagggtgggaaagagcgtgcgctgctcggcctccggaacgactcggacaaggaggttgagatcctcgtctttgaccttgcgtccgactaagcttgtagctatgtagcgctggcgatctctttctttcgtgcttctccgtcgaactctctcatgaccgcttcatgcccctaagcctgtgctcgtcgtcgactccggggaagggcgcgtctctaaccctagctttctcgaccgtgccgcggcgggctcgccctcgcccgctcgacctgctcttgtccatctctcagccactcctcctctcgtcccctccgtcccgctcgtcgtccacgtctgggcagtttgcgtgcgctcgctccctccctcgtacccgacctatggcgccgacgacgaccacccgcgcccgggcagacagcacgaccggcgggagctcgcacgggctcggcatcagcaacctcggacctgccgcctcggcctcgtcgagctcgttcgtcagccagcagcagcagctctcgaggaaggagagcgtctttggccagggccaggcgcataacgacggccggaagtcgatcgtcgcgatccagcaactcggccagcagcagcagcagcatcgacggtcgaccgtcgcgcgccctgtgctcggcggcggcggccggcggattagcgccgcgcttggacaactacgggaagacggtcatggcgaggatggagatggagcggcggtcgacgagtcaagactggatgcggaggaggtgttgcgggcgctcggtgtcggcgaggcgagaagggtcgaggccaggctccggtcagtcccttctgccctacctaaactcccggccggcttcgctttagcacgcggcgctctcgcatatctgtgcgagccaaaagctgattttgggccttcttctctgctggacgacccagctcgctcgcccttagcaagcagcatgagctccggacaatggttggcgagcgataccgcgacctgctcgcgtcgtccgaagcgctcggcacactctttgacgcctcggccagactgtcgaccggcttgggccgaatgcgcgagctcgtcgggggcgtaaaagacggcgaggttggcctccccggttcggggacgagtgtcgacggagcagcatccgacagcggcgtcggcgaaggtgcgtttatcgagctcgagttgagagcgagtttcagagctgattaccactccttgtcatgctgcagagctcgccctccttctgcccctcgcctcgcagaccaaactcctgctcgacgcgcccgagctcatctaccgcttccttgaagccggccgcttcctgccggcctcgtacctcttcgcgctctgccgactcgtgcactccgaagtcgccgagcgggccgctgccgacgaggagggcgccgacgatctccctagcgactacggcggtggtgctggcgctggacgggtcggcgcgctcgtcgaaggccagtgggagacgcttcagggcctccgggccgtcatctctgaccgggcgcgggcgagcctccgcgagccgagtctcgcgccagcgacgcacgcgcagacgctcattgcgctcgttcagctcgactcgctctcgctgagctcggccctccaactgctcctctcgcttcggctcaagttgctcggctcgctcctccccgccttctcaccgtccaccctcgtcgctaagtcggtccacatccgccactcgtcaaaggatggcggcgcaggaagcagcacccagcggagcagctcgacctcgcgcgcccgctcgaggccagggagcaggtcgacgagccgcgcaccctcacgtcctagctcacgcgcgacatcgcggaccgtctcgcgcgcgccgagccgcgacgcatcgccttcgcggcggctagcttgcgctgcggcgccgagtgctcatggccaggagccggcttcggcccggcgcccggtcaaagacgtcgtccgcgaggcggtggccatcatagtcggcacgatcgggctcgcgcgcgaggtctttggccctccggccaagttggcctcgattggtggcgagggtcgttcgacgctcgagctgctcgtcaaggctattgaagcaggagaccagacggcgtctgtgaccgaggcgcaggacgctagcgaggcggccgaccaggtcggcgcgctcctcccctccgcttcgatcgacggcacagccaaatcgcagggccagcgaaggcgcgattcgcggcttgcgagcttgtcaatgccgttctccttcccgtcgtcctcggcatcggtccctgccttgccgagagcacttgcggccacggaggacgcatcgacgctcacgccctctgctgagccgctcatcaccacgcgcggactcattcagacacttccgtcgtcgccgctactcctgcggtacctcccgcgcggcattctcgactatacgccgtacctgctctcgccttcggccagcccgccggcgctcgcgagcgccctcgcagcctggctcaaagaggcacttcagctcttgtcgactgcgctcgagggcctcgtcggccagctgacaaccgtccgtgccgtttggacgctccgggccgagatgactgtccttctcggctcgctcgtcggcgttgagccggccgagaagacagaggtcgccgctgtcctttcggccgcgtgggacggccgcgtgcgcgtcatctgggagcgccagctcgccggcctccagtcaacgctcggcgaggcgctccggctcaagctcgccgcgcttgaccagaaggagggcgagggcgacatccacccgccggcctacctctttgcgccctcgatccccttcccgacgccatcggcaacggccgcctcgaactctgccgcgtgggccccgtcagcctcgctcccgacctttcggaccgcgctccgcaagcgcgtcgctggccgcacgcccctggttgaatcggtcgttcacgagctcgagagcctcgcaagcgctctccgcgacgacgtcggcgtcttgctggagacagcaaccgacaatggcacgccggcagccgacagcaactcgctcgagcgggcgtttggcgcgagcgcgagggaggcgctcgacggcatcgtccgcgtcctcaagactgagctcgaagaggctaatggctttgacttcaacgagggcatacggcacgagctgttcctcggtcgagtcgctgttcacctctgcgtcagcaagacgtttgagcgcgacgtgctcgtgtttgacgcggcagcggcggcaagcccatcgcgtgggtgccgtcgcagttgcttcgatccgggccgttctgtggctgacatcctgtcgatcccctccagcctcgccttttgccaggcacctgatggacgtccactcgctcagcctcactcgctggcgggaaagcgccgttagccaggccgttgctgaggtcgagcgcggctgggctggcgacgcccgggtgcgcgaaatgcagctcgagtactcgttcaagcgtgcgtcctgccttcagcaagggagcgagaacggaccgctgacctccgattctttcttcccccctcgccttagcctcaagtgccgatgcggccatctctgtgcccgccgccatcccctcaccgccagtcttgtcggcgctccactcgctcgtagaacagcttcaatcgctcggcctcccgccctctgtgccgctcgacggtcagggtctggagctctacgcggcctttgcgtcgcgcgcccagggtctcgccggctggtcggccaccgacgtcggcaaaaagggcaaaatcgctcttgcagccgatgccctgttcctctcgaagctcgtcggtgagagcgcggcctggggtacgctcgtcgacgagagccttaaagcggccgccggcggaggatcggcatcgtcaggcctgctcgcggcgctctcgcctgcagtccttcacggcctccagcggacgcagacactcctcttgccgattctgcctttgccggcgttcagctcgccgcctgtccggcaggataagccaggcccgcaaaaagcgacctggctcctgccgtttgcagcaccgccggccgcgcagggcgggggcgacgtcgtcagtgcgctcagcgtcgccgcgccgagcccacgattcggccttctggcggtcggtcgatagagaccctccgatctcatgattccctcctacatgatctcgccccggttccacagctcttggcgagagtctgctgcgagaaaagggggcgacggccggatgagtcctgctgcgcgtcggcgatcgccgctcctcctcgcttcgttcagcccgggcggaggagcagcatggcacccaacttcgtgctcgctctctgacctgcttctccatcgctcgagcaacggtcgaccgcagcccgagactcatcatcctcctcccctgatttcagccatgtctgcttcaagtctgcaagctacggcatcgctcgccatcggccggccgggcgagctgcctaactcgttcatcgtccgtcgctccctccaccctcgccgtcatctcgtccacgccctcccagcagctaacccgacctgcccctcttgcacctgcagcccctctcttacgacatcctgatccagcctgacctcgagcgcaagacgtttgccggctcgggctcaatcctgtgcgtaccggtcgccgccagctgcatcccctcccccccgagttgacgaccgcctccgcctcgttccatccgcaacagcgttaagcaggttgttaagaaggctcttgagctcgtcttccaccttcatccagagacgacgctcctgacgctggcactcgccggcgaccccgcgtccggcgcgccagcggtcgagctcccgccgtcggcctaccggcgcgacgcccgttggcagcaggtcgtcgtctcgcttgcctcgcttccggtcgatggtggccacatcgggcgaaaacttcggctcgacattgcctggtctggtacgcttgccatgtcgcctgcgaacggcttctacctctcgtcgtacagcgactcgccggcggctgcggacgaggccaaggacgacgagctcaagtactacgcccagacgcagttccagccgaccggcgcccgcaaggcattcccttgcttcgacgagcccgggctcaaagcgactttcgaggtccggatgctcgtccggcatgagcacgtggccatcagcaacatgccagatttgtcgtctcgaccagccgtggtcgccgccgctgctgacggcgtcgatgcacgcctcctcaccctcttcgcccgcacccgctcctcgagcgcaggggccgccgccagcctcgaggagctcaagctcgtcaagttcgcccagacgccgctcatgtcgtcctaccttgtcgcctttgcgaccggcgactttcagtacgtcgaggactcgttcgtcagcaagcagagcggccggacaatcccgatccgcatctactcgacgccgaacgccgtccacgagcttgacagcgcgctctgcaacacaaagctcaccgtcattctctgggaggagacgttccagatcggcttccctctgccaaagctcgatactctctcggtgcgtgtctacgcagacgtctcggaagcacgtatttgcgctaaagaaccttcgctcgcagtgctcaaacttcggtggaggcatggagaactttggcctcatcctcaatacggagcggctgatgcgcctgccgccagacgcaagccaggcggccaagaacgggcagctcgggctgattgcgcacgagtgcgcccaccagtggttcggcgacctgtgcacttgccagagttgggagcaggtacgacctgcgacctgcgacgggcgacccagacctgaatgcccaaccttataccttcctctcttccctccctcccgtctcagctctggctcaacgaaggctttgcgtccatctgcggctcgctctttgcgcctgccatgctgctccctgggacccgcgcgcgcgaagccttcatcgcgagcgaggtctggggcgcgctcgcggccgacagccggcgcacgagtcacccgatcgaggtgccgatcgaggatccgaccaaggtcaacgacatctttgacgcaatcacttacaagaagggcgcctcagtcctcgcaatgattgctggctgggtgcgttcctggttgctctttagttctcgctcagcccgaagctaacgcgcaaccccttccccgcctccaggtcggcgagaagacgtttctgaagggcgtcagcaactacctccgcgagcacgccttcgcaaacgcaacgacgctcgacctctggaaggccatcagcgaggcgtcgggcaaggacgtcgccaaggtcgccaaaaactggacgcaggaggtacgtcatgatcggacgaagctctgaaaggctcaacgactgaccctgccttccggccccttcggcagatgggctacccagtaatcaaagcccgcctgcgcgtcggcaagctccacctgcagcagaaccgcttcctcgcgactggcgacgtcaagccgaaggacgacgtctcgctctggcacatcccgctccagctcaagacgttcggcgccggtggcaagactgagctacacagcatcgtgctaagcgagcgcgagacgtccgtcgatctcaagggcgccaagtcgttcctcctcaatgccggttagtccaccgcttgacccgtcgacaggcttgaccgaagctaattttccgcccacctccaggatcgaccggcgtctatcggtcagtctctcgccccatctgctggtattctgctgcatgctgatgtcgccaccacctgcagggtcgcctatgacgtcgacacgctgcacgccctggccaaggccgccgttgagtcgcccgaccaagtgacggccgtcgactcgcttgccgtcctgaacgacgcctacggactcgctcgtgccggctacctgccctcgactgtcatgctcgacgtcgttcgcacgctcgctcacccgaagcaggagcacgccctctcctcgggtgtcgctctcatcctcgacgacctgctcggcctcttcttctcggacgcgcgcacctttggcgcgatccagcagatgcggcgcgagctttttggcccggtcgtcgcccggcttggctttgacttttcggccaacgaaacggccgagacgatccagttgcggacgctggcgatcagggaggccggtcttgccggccacgaggtcgtcgtcgactgggcgctgaagcagtgggcggcctcggtcgaggacggcaaggcgatcccagccaacacgagggcgctcgtctggtcgctggccgtcatccacgtcggcgagaaggcccacactcgactgaccgaagtcttcgcgacggcaaagaacacgacgtgcgtcaggctagcttccgctctcacatctcaaacgctgaggtctcttcgctctctcctgcctgcctcctcagcgacaaggcggatgccgtcactgctctctgccagacgacctcgcgtgacctcgtcgaccggacgctctcgctcatcgacgacgtcgccgcggtcaaggacattgacggccggctcgtcggcatcctccgcggcctcgcagtcaacccgcgctggcgagccgtcacctgggcctggacccgtaaccactacgacgcgctgtggaaggtcctcgagggctcgatggtgtgtcctcgtgctcttctggtctcatcttgatccgacactgaaaagcgcttgcgtttgtagggcggccgctacgtcccgctcctcacgctgccccggatcgcgagccgggccgacctcgacgacgccgctgccttccttcggaccaaggacacgtcagaattcaaggcctcgctcgctcagacgtacgagacggtcgaggcttcgctcctcttcctcgagcgcgacggcgcaaagggcggcgaggtcgcgcggtggttccgcaaggccgagacgaagcaagcgcctgctgctcgtgcgagtgcgcaggccgttgccgacaccgttcggccgcagagcagcctcctttacctcttctgagcggcgtctcttagcatctctctttcggcatctcgcgttgtacaccccccggctgattggatttaaagttgaatctcgtctatcggaagcagagtcgagcgctgagtggggatcaaccgaaggagggcggtagcgtgatgggttggcggcggtcaggagagcgttcgaaggctgaaaggcggccacgagaaagcagaatgagcgacagcgcgcaggttgtaaggatcggctacaaagaacattcaagaggggtcagtagattgcaagacgaaagaccagggaagacaggtgacggggcgtacgaaccgaggctatcaaaagatgctcagtcccgtctaatggaagtgtgcgggaaccggcgatccgttacgtttgacgaggtcgacgccgaaagtcttgagcgagtcggcgaacaagcggatggccaaggcgactggttgatcgacgacgacatttcgaaagtcgaaggttgagagttcgacttcgctcaagctgggatacgcggaggcgcatctttgttgtggacttgggagcgacaagacagaggtgctcgaggatcgctgtcgcttcgtgcctgtcgccattgacagacgtcaggatgtccaggagtgagtggccaccatggatctgaaaacgacggagcgccggcagcggagggagcggcaccaatcgtcccttgagggcgagcgtctcgagccgcgggaaagcgaagccttcgagcgaccacccgtgatcgcctgaactcgattcatccagaacattgatcctgaggctaaggagctggcggccgaggacaagcagagcggcctggatgtcgtccgatgcggcctgctcgtcgtcgagcaagaagacgaggtgctcgacccggacgacctcggcaagaatggccttgacgaatccggtcgagctatcgtcgatggtgagatcgagtgagatgaggcgaccgaggtcggcccaatggcggagattgtgaggcctccaaagtcgtatcaaggtccgggaaagttctggagaagggcgtttttgatggccaatctgagatggttgaggacgagcggtttcggcggaaggtggtcaagattctagggtcgaaccaggaaagggtcgcgacgtgcttaaggtttgaaaaggactcggcgaggcgaatgaggtcagggtccgccgagatgaatccgtcgtcggagatcgtgatggaactgatcttgcggaccagcggcgcaatggatacaaagaggacctcgtcgtggactagaacgtcgagcgaagaagggttttcgtcttccagcccgcgacggaggacgaggtgataaaagagaagcggcttgcagaacgcctgtcgcagggactgagcattatgggtgcaacggcctgtcagccgccagcacaccaagagaagatcaggtagagcggccacgcacgccaaaatgtgagcagacgagtctgagggtagccaggatttcgttccttgatcgaatggcctgatcaaagtcaccgagctggagatgtgccctcggagcgggaccgaccgctgcctcgaggacgaggtaccacaactcgagcggcagcgacgaccagccccagagcataacccggaaagcgtcggccttgtcccgcttcgctttggcggcggcttcgatgaccgccacgcgcgaaagcgagacgttgagcttgggcgcctcctcagcgaggatcgcgtctcggacggctagcagctcgcggcgcgcgcttgctcgctggccgggcggtcggagcgagcagagcaggtcggtggcgtcgagcgatatggcgcgcgaaggcgggcgcgtcggaaggttgatgttggcggtagacggtgggcgatacagacggcgggcgatacatgccggcggacatggcgagcggcgacggaggagggtcggagcgcagcggggaaggctgcagacggccaagacgagcgacaggctggaggtaaggacgcagcgagcaagagcggtctcttgagacgagacaggattacaggatctcagccaaatgtgcttctagagacagaaaagaggctgccagggcgcacctgggtggaagaaaggccgggcgagggttgacgtcgaggaagacaagaaaggggtcggcctcctgccctgccctgccggcccgacctcgcgcccgtgcaccctccctggccctagtctcagccgtaactacttggacaaggtcagttgagactcgcagatcactctcggacctcttccaggctgcagagggaggctgctggagggcccggctgtccctgttgccgcccgtcgacgcgatgagacgagagggggaaacggggcggcctactctcgacctgcctcctgaccgttaccgccgctccttcacctccctcgctggcaagtcagaacagacacagaagctcagatcgcatcgacgtgctctcgcctggaccagcatagaggtgcgccgccactgggtcgcttgcagtcggccgaggcatggctgacgttcgtgctcgccgacctcactggcctcgtcaggctaccagctcgacctgctctcgccaggcctcggctggcttacctcactcgcgagtttgttcacgtcccgccggaaccgccttgtcaatcttctcaaacaaggtgcgtgtgcggcaggcgagacccgtctcaggcgagctcgtgaggcggccccgactgacgccgctcgggtcgtcctgcttacacatgtccctcacagctagctggctcaggtggcagcctctcgcgtcaacatcagctctcgctccgtcgatcttcgtgtacgtcctgcttgatgaagcttggccgctcgacggacgggttccctgatgacttctccttcgcccgttctgcgcagcccacgcccgttcgagccagcccatcgaccatgggggggacgctttgctctctctctctttcttatctctctctttgcacccatggttctggacttctggggaaagaggcatttccgaatgagagggacggggggtatacagtttggcctgagcagggacagggttccgagtgtgtttcgtcggtcgggcggactgcgagcagggttgaaagcagaggaaggagggaggacgctgggtcgttcgagcaaccgcttgaagcgcggtcgatgacgagcgcccgctcgctcgctcgcttttgtttagagcacaagccctccaccaacgagcatcgccagcgcgacccctgccatgcccacaagcaccgactggcctccaacggccttgccgacgaacgcgcccgaccccggcgccgcggacgaagcggccgaggaagcacccgatgcacgcgaggcggcagcggcagaagcgacggaagcggcgctgacggctgctctgtcctcgcgcggacaacgagccaggaggagaggccaagcgtcagtcgtcgtcctcgaaccagtcaacgacgccccgcgcgcgcaagagggcgagacgggcaaggaaggaaagaggggacacacgaagtcgcccttgctccagcggacccgccggaggcggtcgcgaccgagtaggcggacgaagcggcattggcgatgttggaggcttccgaggcaccgaaggcggttacggactgtgttgagagggaaagcaagtgagagagcgtcagccgacatccctagagagcgccgactgggcgagctcttccccctccgagcgagcgaagctcgccacagaggaaaagagaggaaaagtgggacgtacgccaaacccaccaacgacagcgcccgtcgcggtggaaaacgcccctgatcaaatcccgaaatcgtccaagccagtcagctcaagctccaaacgacgacgaccttctcccttacccgcccgggtggactcagccctctgcgcgcgcgcttacgcccgagcgggaccagagagacaagggaaaaaagggggaaagggaaagggaacggaccggccgcgccagacgtgacggtttcaaacaccccgcccgcaccagacgtgacggtttcaaacaccccgcccgcgccagacgtgacggtctcgaagacgcctcccgcgccggaggtgacggtctcgaagacgccgcctgcgcccgaggtggcgactgagaacgcgcctggtgttagaaggggggaaggggaggaaatgtcagcgggaggcgtcttcgagaccgtcacgtctggcgcgggcggggtgtttgaaaccgtcacgtctggtgcgggcggggtgtttgaagtagcatctcttcctcacgtccgcctcactgtctccatcccatgccaaaatctattcgctttgagagagcacatgaaagatagataaagcgagcaagggaaggagcgtgtcgttacaaacgacagtgagtagcgacaggggggagaagcgaacgataaacaggcagagagcgggacagacaacgaggggaaggagagaccggtacaccaggatgagcaaggaaatattaggttcaagggtaaggtggctagagtgagaagaaagtgtcgacgtcatgctggtcttgctccgaggcctccgacaccttggcggcgatctcagcccgggagatgaccttgggcgaggccgacgtccgggtacgggctggcccggtcgagctagagcggttgcgcgacgaactggaaagcgactggtgaagaggcggcggcgcatgtttcgagcgcatctgcagcgtgtcagacggtcagcgcctgcgggagtgagccgaaaaggggggggggggagcggggacgtacgttgatgccgtgggagttgagcgagccgaacgtccggctcatgcgcgacgactgccggttaacggacccgccacctccaaactcgtcggtcgggctcgagccaaagtcgtgaccgtcgacgggcgtcctcgggccataggcgtgttgctgctgctgctgctgatactgctgctgctgtggggggaccggccggtactgcatagactggcggctgccgggaccctggtcgagcttcgacaggtagtcggcactcggcccacccgcagcgtcgtacgacgcggtcgacgacgacggcgagtaggagaggcccggaggcgtcgatgccgagtcctgaggacgccgccgctgccgccggccgatgacgaggccgtcaccgtcgccgccgtcgtcgctatcttcggccgacagaggcgtcgttctgccggcactgaaagcagacgggagcgagccaggtccgggcgaggccgaacgttggccgccgtacgtcggaatctgaagcggaggaggtcttgcccgctgctgccgatgaccgggatcattctcggcaaccatagcaagtcctgaccggctaggcgaacctgggacctgcggtgctgctgacctggccgaaggaggagagtcttcgatgctcgcgctgagcgacgcagtgacaggcgaaggcgagcgaaagttgggcccgctgctgccgccatagtcgttcgacgagctgcggccaagctcggccgacgaacgcgggcccatcgtcggcgacggggcagatctgccgacggcgacagggttcgcgctgccgagcggctcggccagcccacttgaaggcgaccgacgcatcggctggccgaggagactcgaggcttcgcggagacggcgctcggccgtccgagccgcctcggctcccatggcctccttctcctgtcggagctaagggaatgccgcgagagccaggaatcagcgtcctgcgcaggcgcgacggccaggttttaaagggacgtacctgttctgggctcttcagcaccgagcggctcttggacaggaggttgttgctctttccgccatcggcctgcccactggccgtcacaggaggcgccgcagcgggcttcttgcgcgacgtcaggttgcggaagatgccggcgagtccgccgccgccaccgttactcgagctgcctgccttcttggcctcaaccgctgacttaacgaccttcggaggggcggccgccttctttgacgcgccagccgtcagagttgccggcggcggaccaccggcctcggccgtcggtgccgtcgctgaaagacgagcagcaggcacggccccggccggcggcgtatccgtcggcgagcgagtagccggaataccaggactcgtcgaacgcttaaggccgaaagccagcatggagatcttgcggccgatcgtacgcggcggaggtactgcgatcgtagtcggcgccggtgccgcctttggcgcggtcggaacaggtacgattgctggttggctagagggagcggagactgccgcgtccgagacgcaggaggaggaggcattgttctcgacaggaggggtgccggcggccgatccggaaaatcgggcgtcttcgccaggcgacgattccgcgccgttcagctcgggagagccggatgcgctcggaaggcggctttcgaccctcgagtcgggcggcgtgacgggcgccgaaccagggctatccacgttctcgccgtcttccgggccctcgagaaccgggtccgatgctgctggcggggtcgcgaagcgcacgtcggcctcgccaggcgccagcggcgtcggcggtatcatccggaacgtcggcggcgaaggcggcgtcgatgtatcgaggccagcttctggctccagcggtggtggctcaggcagatcggccagggcggaaggcggcgaagctggaggcgaaggcgggaggtcgtagcccggtacgggtgacgcggggagcggaatagccgtcggcggcagagcctgcatcgtgctcgagggctggtcgtcggacatgatttggcgttgaggcggttcgattgcacccggcggagggggaagaagaggagctggagacagggagcgacagccaggtcgtcaggtcagccaagtggtttcttgttcggcttggcccacgctggctcgatctgcgatacgcactcggtgggctgaacgaggggcgagcggcgaaaagcaagcctcgagcggcgtctcaacgatggacggtccggcctgaagtacgaggggcgttgtccgaccgcttcgactgagtgccgcgctggctgggcttgagcgaccagaagctgccggagacgaggtgagggagagtagggaggtcgcgcgcgcgctttcgccaggtcggtcggagggaccgcggcgcagcgttcaaccaacaacaatcggtcagcccttgtctcctttgactctgcagccgctgaggccttgccgactcacagacgtgtatgcaggagcgcgtccgagcgagatcgatgttggcagcaatgaacgacacaggcaggaggccacggctgaggtctctcgaaagggttcggtcgtcgcatcgtgcggcgctgctggacgcgactcgaggaaaaggttccgcttcgagactgctttgctgatcggccctcagcagttcgctcagctatttattgctggcggacaagggaaaaggtgcaaaaaatcaatcgttagtcggtgggggagcgtgtgtaaatgacgaagcaatcaacaagggtgggcgaggaggaagagcagcaggcagagcaggcaggcagggcgggcgggttgaaacaagggcgtgtacgggtttcgtgagggggtgaaggagggagtgcacggtgggcagcttttcaggaacgggcaagacgacgagggttggtggatgatggtacagtgaagggtgggaccggcagagacgccttgcgggatttagaggggagacagagggggagggggaccggtcgagatgacgagacgagatgggaggaggccggcgccacttcaggcttgcccgctctgaatgggcgtcgacagcccgaggccgaggacgtcgggttccgacccgactgccttggtctgcgaaaagttgccgtaggtgaacgagatgggggacgcggccggctctccctggctcgtggctgaggcgggcgacgtcggcaggccctcggagacgctcgctggagatgtgttccagatgttgagcagctggcggccgacgtctggctcgagctcagtcccgtcgcgcgaaaccttgatctcgcggttctggttccaagggttccggaggtgtttgactgaagaagacggagggagttcagcaaggtcaacaggctagcagccggtcgtgcgacgcaccccggtagaacggcagacgccgcgtctggagccactctacgttgaagggtgtgccccacgtctcgccctcgacctcgtcagttgtcgtcttctcggccggcagagcctgcgtcgtcgtctctggggtcgcaggaaggtgctcgttcggaaacggaaacgagcgagccgagcttgcgccagccgacgagccggtgaaactcgccgccgagggtccggatccagcgctgccggtgttgagctcggcaccggcggacgagacacgaggggcatggtcgatgcgtcggacgccgtcccgatcgagcgtcggcagctccggatgactgccggtcgcctgcgcaaacttgggcggcgagagcggcgcgtggtcggccgagccttcggcgctagccttaccgacctgactgatgatggccgccgtctcggtctcggacaatgtgcggggcgggctcgaccgctcgctgtcgtgcgacagctggcgggcgaggttgacggccgtctcgcgctgctgcgactcgagctcaacggcacccagcgcagctggcgcgctgtttcgcggtgtcgaagcgcgatcgacgtcgccgactttccgggcgagcaaactgatgggcgttgtcgcaggcaccggcttctcgttgaggctgaggccagcgatggcgccaatgtagtcgccgccggtcgtcatctcgcctggcgaatcctgcagcccgtgctgcgaaattgacgactggctggcggaggttcggaagaagggcggcttggctggggacgggtgcgtcgtcgcccgagggtgctcggaaccttcgtcttcggagccctcggcgatcatcgacggcgccgagcgctgttgggaggggtgcgccgggtgcgtcgcagccgtcggcgagaggccggccgtgctcgctgtcggtgaaattagcggcccgctcgaccgcgaggcccacgagaggcgcgacacgccctttttgatcgggccagccatcctacgcaaccccagggaacggcgtcaaatcactagaccccagcaatcgtcagagttcagagacgcacctcgcatagccaaagaactccccagtcttgttggcgccaaagatgaggacaacctccttggacgtccggaaggcctggtcgagcaccggctcgttgtgcggctgcgtcgcccagagcccagtcttgagcgacgtgtcgaggtcgacctgcgtcaaacttttcaggatgaagtagcggatagggaagtagcgggcaaggactggagcgcagggggacgagcaaagtcgtcagcagcggtgcaggacgtctctttaggagccaggcgaggaacggaacgcacaactcgagtcggtcgacgcctgagacgagatcgtcgacccgcgatgcgactgcggcgtcgtcgcgacggcggtgaggcccgatgcggatcgtgactcgccgccgctctcgctcgtgtcgatcctcgacggcgctgaagccggcgccgaactcgcggcggcctgcgcctgctggtccttgacccagtccttgtgcacgccccgcccgcgctgtccgccgacgccggctttgaggtcgtcctccttgcgccggacgcggcagacgagccgcaacgagcgagggccctcgagcggccgaatcggaaggccgttgaagcgggcgatggccgagtcgagcgcctcttgcgagcgatagttgacgaaacagcagctcgagcgggcgatgaggaagatcgaggcaacctcgcactcgccgtcaaacggcaccggcgcagaagggtcgatcggcgacgccggaggcagctcgcccgcctcggccgcaaccttcagagtctcagccgtctcatcgaggacagctgagggtgccttgggcgagccgccgtgggacgagacaggccgtttgctgagcggaccggtaaaaaagcgccagagctcgtcttggcttgagtccgacgggacgttgccacaccacatgacccattctgaccgctgggctggcggggcagggtgccaggccttgcgcgtaggtgctggcgagttgctgccgccgtgaaccgcagggcctggtcgacgaccgccaccggcagcagcattgggcgtcggcatgtttgagttcggtccgggaccgcgcgcaagagggccgctcggtccagccggcatcggcatgacagttccggaagagacaggtccggaaggagcaggcgcaagcggaggccgaggtcgaccatacggctgctgctgctgctgctgactcgagtggaagggtggcgtgtgctgctgctgggcctgttgcgggttgaaggcctgctgctgctgatgcggaggcggctggaagccatacggcgcatgaggcgacgagctgtagattggctgcatttgaggaccttggccgccttgcgacgagaagctgccatccgacgatgggagggggccgggcgggtaggcgaccgatccaggttggccctaagagcgccgggcgagagagcgacacagtcgtcagacggtcggtcaggcttgcaagcgtatagcccgtcgacagtaggcagaacgcacgtagtatcccgacatctggaccggcacgtacacccacgtctggccattgtggctctggatcgtgtgcgggctactcgaggccgtgctcgacgagccaggcgcaggactcgacggctcagagtcgatcgacgagggcggcccggatggcggaaacatgccttgcggcactggcggcgggacaaagtagcctgcgtggaggtgcgggctcccgttgaccggcatcacgtacgggttgggctgcgcgtacgggttgaaagcatacggcccaccggcggccgggctcgtcgacgttgattgggcgggtgacgacaaggccgagggcgagaagacgctgccggcgctgctgccgtcctgcgtcagatggccagagccgtccggcggcgagaagcggagcggctgctggctcggtgagtaccagctgccggccgggccgccgtacgagttgcctgcgagcgtctgctggccgtaacctccatcgccgccgccaccgccgtagaacatgccgccgccgccgccgccattggttctcggctggccgttgccatgaatagcgaccacgaagccattattgttgagtgccgggctgccgttcgcacgctggctcggccggcgagcgttctgcagatccgggcggtagccaccgcctccttgcgggccgccgttgaaggagggcatccggcctccgccgacgggcggccgaccctgcaaaggatggaagccgccatcctgcggcttggagccgttcggcccagggcggaaggtcggctgctgctgctgctggacccacggcggctggaagggcgctctcgaggaagggttggacgcctgtcgctgaggctgctgctgttgctgcgaccgcggcgcaacgtcggcagaggcaggagctgccgcgacgctcgagctttgggcgtcgggcaggtcgcgtttcgagttcatgtcgaaggccggccagcgggcgtccccagcgggtgttgccgctgctgctgtcgaaggccgctgcgcaggctgcgggccagcgtcaggcgagaggaggaggctgccgagggcagaagtcggcgcgaggtcggcgtcctgcgcggccttgctcactagcggtagcagacaaaaggcagcgacaaagcgagcagatggcggagggcgagaggatggtcggcggaaggggagaaaacgaaggcggccgggaggtcagcggcgttcgacgaccctcgaggacgagtcgtgggaggaagggggcccgtagcgccgtcttgctcgctcgctcgctctcgtcctccagcaggcagagtcgtttgcgcgcgcgcctcgcgcaagacggcggcctcggatcgagggtccgtcgaggacatgcttgcggggtgaagctggcctctgcgggggaaggcgagaaagcactcactcctcgcgggcgcaataagccttttgcgtggatttcgaagggacgacgagcaggagaaggtgatgggtgcgaggagggaggctgggcagaaagcgaaggatgatgctgtcgctggccggctttgcttgatagggagggttgacggttgctttcatcgtccgtctcgccgccgctctcatctagcccggccctgcttgtgctgctggcccttccctgcgctcaagaaacccacgccgaccttgtgacgtactggccggggccaaacactcttacggcccacgcgagcgagccgtctcgacccaatcctcccgctttgcgagacggcgacgacgacgacgagcgagagactagtcagagagaggcagcagtgagcagcagcagagagtcgtcctctgcaacacatcctctcgctgactgccttcttggctgacctttcttgcccggctgaatggctgacggactgacccaaccctgaatgctcgcgggctgcccctttcccgggccggccaaacctgccctcggcgcctctgctcgctcccttcttcggcagttcgctccacggctgcttgatgagcgcgttgccaaggggagactttaaacatccaggcgtggacccagcgggcggggagcgtcggatgaggcattttccactccacgatgaaagaggtggcggcggcggcgccaggcgtgttgcgcccccatcttcccgggcggcggcccaccgccaaaagggttgacctccttcctcccctacctgctcccgttgccggcgactgtcggccgggacgagtctgcccttctggccgatcctgagctgcctctcacaggaccgatgcggtcacctgtcgactagcgccagcggcaggcgaagacgagcgcgagcccagcccgcctttgaccccaactgcatcctctcatctttctacgaccatcctcccgccagaggtgtctctgctgaccgcccttgagcagaacgctgaccgaggacactactggccagtgactatctccgaccgctcagacgtacgacggccagaatagccgcgaggcaccgccgcgcgcgcgtctatcgctgcccaggaaccttttcagcattggcctcgcccaaggcaccgatgcagacgagtgcaagccacccaagagtctgcgaccggtcgtgttaagcacgcgccttggcctcgccggccagagagggcgggaggctgctgctgcctccttgccgctctttctcgtccgaccttctctcccctgcagcccactccgttcttctccctcactcgtcctccgtgccctcaacgccagactctaggacggccagccatcctcaacactctatctccgcccttgttgccctcactcttttcctcgaggacgatgctcccacccgcgtcgctccagcaacaacaccgctcgccgctcccccgccagcgtcacggctcggtccccatcaacctcttcagcccaccgcctaccatccgcatccaggccccgacgccgccgagcctcgtcgacggccaaactcagcgccggcgacggtcgacgacggcagtcaccggctggctgaaggacgtcgccgacctcgcgacgccgccgtcgaacgggccttcgcccatctcgtcgccgacaaagacgttccgctcggccgtcgcctcggccaaggacggcctccctctctcactcggcaacaacagcgccgagtgggcgttccctctctcgggtccggccgcgactgaggctcgcactcggcaccagagcgagctcttcaaacagcagctccgcgtcgccgaccttcagcgccagacggcccggctcgctcacgaacgaggcgctgaaccgtctagctacatgcacaagtcgaccgccaaaaagggcttctggaacggcgtcaagcaccgggtcgccagcagcctctcactctcggctatgacggccgacagtgctccggccaccaaccctgtcgagcgggcgacggccgacgcttctcgccaagtcgtacgtccgttcactttcgtgtctcctcgatcgcgaacatcgaccaccgtcttctttaccttaagcaggacacactcggaagccggcaggcaatctaccaggaggctgcggccgagccctcgtttgtctcgatccggaccaacgactcgcgcgttgacgctaacgcctccaagcaccgtatcctccggcccgccagagacccagcgaccgtcgttccgctcgagccaagctctcggaaagatccacgcgggatccggccggaatccccgcgttcgcagagcaaaacatgcaacgaggtgcgtctgtttgatgacagggtgggcagcgggctgctaacgtctccatattgtcgtgcgtagcgatgggcctcgcttccgccgccccacgttccaccgccgccgccctcgaagccgtcaaagactgcccccgtcgctcctaacgatctcccgcacttaaagcggaacagctcgggcttctctctctcgagcatcctccgcggcgactcgcgccgcgtcaaagtcgattacccagtcaagagcaagctcccagtcgcagaggccgcgccacggcctcagacgccggtcgtcgtgacggcgccaggcccgatcaagcgctcgtcgacgagatttgccggccaccggcagtcgctctacgacgagtaccgcaagccggccgacgttcaagccaggatgacccggtcggccagcgggccgctgctctcggtgcgtcgaagccgtgccctgaaggtcgcctctgccttcgctgactctcactacacgacctctacctgcttgcagtcgagctgccgccactgcggctgccccacgacgcaagaaggcctgcccgtcgctccgcccagcgtggcgaccgccgacaagtacatggcgacgctcttcgccgccatcgagcgccggctgagcgagactgtccagtccgactcgagcggcgagaccatcatcgagagtgagtcgtctcgactcctgcgactggtcttccgactgactcgaaggtcgcgcactgtagcaggcaagcgcctttcgctcactctcgacggctcgaccgcgcccgtcatcctcaatttcttcccgccagcctcgaccggctcgatcaacctcgacccggtcgcccagagccgctacgcacccgatgccatcaacatgaaccggtcggtctactacgtgcgcgagaagcgcgcgctcgccaagatcgagaaggagcagcggcggaaagcttatcgctctgaccatccgtatagtccgttcaaccgacccgcttaggctctgccagtgcgtgctcttcttcactcggtcctaaattcatcttcgtcactgacaatcgcacgcagcttgagccgacccctattatactccgcctccgtcgatcttctctcgctttgtcctgcgccgcctcgtctgatcctctgcctctcatgcctttgatgggaaatcatctattgcgggcggggcaaacaaaagcaagggtgtcgtgcgaggagagggcgtgatagagacagcagcaaaaaaagcaaaaaggaaggcgggtcgtgaaggagatgtacagtaggaggcaaagacgaccagcgtccgattggcctcgttaagagtcggcagggggcggcctacatgagccggagggcttcgatcttctcgtcgaggacgcggcggcgctcctcgtacttgagcttctcggcctccatctgagccgacgtcttgcccttcccacgcttggccttcttcttgggcgggaccgagatggcgccggcgtcggccagcagcggcttccacgtgctgctcttgatcatcgcgtcaatctcggcccatccgccgacggccttgccgccgactaggacgagcggaagctccgtctggccaacgagccggtcgagcaggccgacgaggacgtcggtgtcgccccgagacgacgtgtcgacaaagaagggcttgggctggaggtggagcttctcgagctcggagttgatgaagcgcgagtgggcattgcgctgctttgagaggacgatgacggggttctcggtccagagctcgtactggagctgtgagagagaggagggagaagcgaggtcaggcgctgctctagcatgagcaggggcaatggcaagacgaacctcgatcaggcgggcttcggccgagcgcgcgtacgggtcaaagtcaagcaggagtgacgggtcgagcggcttcgaggcgtcgacggccggaatatggttggcctcggcagcgacaatatactgaggaaaggaaaagccggaggtcagcatctagatctctcggagaagcaacagtgccagagaacctacgttgatgagggccgcaaactcctcgtccttgctgccccaggtccactgctgagctttgatggccgccgagcccgacgccatcgggatgatgccctggacggcccgagcctcagccgcaagtgcgcgccggttgacgatcgccgtcgaggtcgagccgccgcgccggaggccggggctcgagcgagtgtatgtccggtggacgggcgcggctgtcatcgacgggcgctgcgtgaggaggtagaggctacacagaagggcggatggagtcagaggtaggcgtcttgcaaggcagagaaaggcgctagcactggggacgtacaagagggaaacgagacagccgattaggtagagcacagggcgcgaccgacgcgggatgcggatcttcggccacgtcttgggcttctgcatggcgggcatcggccggtgctaagcaaagacacgagagactagtgtcagcgaccatcttctgaaccaccgtcgagccttgatgggctcacaatcttgcccgcccgccgctcgcgctcgcgtacctcaaaggcgtcctcgctcaggtcgagcttcggccggccaaagccgccgctgctgtatccgaccaggccgaggccgagaccgaaggaggcctctgcgccctcgggctggctccgggcggcgtggccgtcgaaatggtgggtccagaggagggcgcgcgaattctcgagcgggtggcccttcggcgtcgcaggtgcgtcgaacgacggcggcgtgtagcagccggcggccgactcggcgtccgactcgtcgtccgtcatctgcgagagggcgggcgaggccgggccaaactgtgcagagagcgcgttggaccggtagccgtacggccggaagccatcgttcttgaggccggccggcgacgagggcggcgtgtcgagctcggccgacatgatgatgggcgtcgtagggcctacgaccgtcttgccgagcggcggcggcaatgccgaggaggatgaggagcccgaggcgttcatgggaggcgggctaggaggagaggtgtcaaggttggtcggccgaggatcaggcgagagtagagggctgagccaaagctgagcgcaagagcaggtgagggagaagaaggtcgcttgctgtccgtccgccgtctgttccttttgaggcgggccaagcgtcagccggtgagcaggctccctctctctcccctcgtctctaactcaggtgaaggctggtgcgggccgaaggggagggaggagccggtccctcgtcgagcctctgttgcgggaggcggagcggggcggggaggccgcgcgctcgatcgcatcttccgtctcagccgcccgcgcaagggtccgcgcagcagacagtcgcactgcagcctgcagagacgagaagggaggagcggccggccaggcctcgttcgacgagacacggcgaagccagaagactggtccccttgctgaaatgccgcgggctggagaatactctcctgggaggggggcgggcgcctgaggcgaggacgccacccgacccgctcagagacggctggccggccacctcgctctggtctccggcgtttctttgcatgacgtcggatgctgagcagccaaagggacgggacccgaaccagatcaacgggccggcagcggagttcttcatcattatcgtcaaaggcaaggaagggacgtctaaagggggagaatgagagggagagctttatcggccctgattgccctcggggggcagctaaaagggcggcacgttacaagtaatcagcatgtcgttcaacgactgccgatcgtcagactgaaagagacgcacgacattggtccaccagctcgagccgagctccatgtcaagaaacgagagctcgccgaggccgccggttccgccggctgggccaaagccgccgccgctagcgacgccgaggttgccgccaaggccgccgacggggctgtcgccgagcagatcgccaaagccggcgagccagtcgaggttgacggtagcgccgccgccggcgccgccggtggccgtgtcgctgaggtggccgccgtcgggcgcaacggcggctgacgtgccgaagtggcttgttaaagggccgccactttgaggcgtcgcttgggcgaaggcgccggcagtcgtcggccaaggggagaaggctaccggtccagcgagcgtctggccgattgggggtggcggacccgaggcccaagcagcagcgcccgcacgctcgggcgagccggtccgcgaggaggcgttgtgccagcgctcggggaagatgggcgtcgccgtgccggtctgattgaaggagccaccgcgtcgagcagcatcagcgcctgctttggcgtgtgcaggcaacgcctgcgacttacgtgcgagacccattcggccgtgtggaaggccgtctttagctgcttcatgaccgtccgcaagagaagcgcatgcctgtcgagcgagaggtcgtcagcggcgttggcaaccttgcagagatccagggcagcgccacgcaccggataccgagatgctgccggtcgggcgacgagttggcaaggcaaaagatgaccttctgaatgagctcgacgacgtcttgggtgtcgccctgggcgaccgccccgctataaacggccttgaggaggaacgagctcgcgaacgagatccagccaaagatgcgggccgggacgtagggcagcgcgccgcccgggtgcagacggtcagtcgcgagctcgagaagttgccgggcggcgtcctgccgggtcgggccgaagcaggcgcgcgtcagttgatacaaaaacaaaaagaccactgatggcgttaagacgcacgatcgactcgaagatgaacttggcgtcggggctctgcgacgttccgcgtggaaagaggcctccaaactttgaatgcgcgctgagcccctgctcatcggcccgctggacgtgagctgcagacggagcgaagcgtcagctcggctcactcagacgcacgtcagagctagcagcgaggtaccttgaaaggcaaaggcaaagacgtagagccggaggtaggcgtgcgtcgaccagatgatctcggcgcacggaaacgtgtcgaagcgctttggtcgccaggccgcgtcaaacccttgaatcgaccgctcaaagtcagagaggtacttgatgtactcgcctgcgcgcatcagggtcagggtgcggtcctttgacgggtagaggacgtcgtgtgccctgtatcgcagatgtagagcggtgatcagcacgcagagcggagcactcacaaacgcaggctgcgaaggctcacgtcgtcatctgctgcgtcagctcgacgagcgcctgcacgacggaggccaggtcatcctgcgtgccgtcgatcggccggagcgatgggaagttggtgtgggcgtcgtttggcgtgaagcagaggccagggccgcgcgaccagaatgctttgccgatccgcagcgagatctgcccggcgagttgtgaacgctatgagcttgatgtcaggcgactagcgggactaggagggagactcacgtggcggtcgaagaggtagcagtaggtccaggcgagacgctcgcggtcgatctcgggcgtcgtcggggctgctgggtcgatatagagcgtttgcttcgagggcggcaatgcggatcagggtcgggcaggtcaaaaggcgtagtaacgaaggcgacgcacctgatcaagcccgagcaggtagccggtccggacggcgtgcccgacaaagaaccagctctgggtcgagtcgtcccacgttttggtgtcggttgctaggacgatggcgtccttctcgtcttgccggggcaggttctcagagagtagcagcatgctctcaacgaaaccgatgctcgtctcgcggcctttgacgacgcagttgtggatgtagccctgtccacaagcgaatgcgacagtgcaacaacgaatcagttgggggcgcaaggcatgcaattgggagaagaacagcccgacgcaccgacataatgtcccaggctttttcgtgcacgagtgggttctcggcatcgtgccggctggcgataatgaccatcgcggtgaggagatgcttctcgtcttgcgcaaaagtctgcagctcaagctccgtcttgggcatgcgcgagaccgggatcatgggctggtgatcgcgcggtcagcgtcagcagattggcaggcaggacaagaactgaagaggaacgggccgcacaaagatctgatggtgtcgcgtgaagaaccacgagacgtatctgacgagcagccgcttggtcaaggcgcccttgcggatcaggtcgcagtcggccagcggtggaggggtcaaagcgcggccctcgttctcgacctcagcctcctgctcatccagctcccggacctgcgcctcgaaggttccagttccgtcgccggcatgcgttgagcctggcttgcggtgcgacgagccctcgctgcgcaagctgcgctccgactgacggccgtcgggagtgtcggccggttcgctggccgttccgggcgagcggccgggacccttcccttgcttctcacccgtcgccgtcagggcgagaaggctgagggcgtcagcctcgttggccatgccggccgtgatgaagttttccggccgagaagacccggtttgagctgtcgctgtcctccgaggtgggggcggtcgcagaggtggggggtgcgagggctggaccggaaagaggatgccggatgaggccggagggggaaaggccgaggaggtcgtgggctgctgcgagagcggattcgaactcgttgactcgtgcgagacgcccgactgatcgagctggtgctggtggaaggaaggcgaggtccgctcagcaggtggcggcatagagccagacccctggcctgagacggccggctgatgaccgctgctgttagggggtgccggcagcatagccgatgacgaggaagtcggtgggagggcggaggagtaggaggggccggcgaggttgacacgaaaggatagcgacggtgaggcttgcatgttcggcaggatgccggtgctcggcagcggcgaccgattgacccctgagagcacgctgctccacatgtcgagctggctcgtcgaccaagtggccacgttgccagatgtactaggcggcggctggagctcgttggactggccgcgcgatgaggctgagtcgaggaagccttcgctgctgtcaagcttggcccgcttctgcacggatccttcgtgcccgacgtcggacgcgaaggaggaccggcgtgggtgagagacgctgccgagcgcttcgctatcgtcctcggtcgtctcctgcttggccttggccttggcagcaaggttgccgccccggcgtgacggcaggaaggtgcactctcgcttctcactacgagcgtcgcagcgcggttggtcagcatgcctgaagcgcacgtgagcgctcagaaccgacactcaccgcttgcaccgagcgcagggcgggtcccgagggtcatccaggtcgcccaagtcgcagcgggccttggattgtagaagaggagctgatcagcagcaggagggaagacttggtctgttcctgagcccggacgcaccttgcgtgaccggcaggccgtgcaggccctgtaagcccgccgggccttctcctcctgttgctgcttcttctggcgggggcgggccatgcagaggagtcagcatgtcttctcaaccagctgcgagagcccctgcaacagacctgggcggcgctcaagggcgtgccgtcggctgcggtcgaccctccgccggcgcgactcggccccgctgccgagctgccggcgtcactcgtgctggctcgtggctggccatcgtcgtactggccgtccgggctgctgtgcctcggtggctgcaggctgtccatgtctggatggcgattctccgacaggcgcggggataaggacagggcaatgcgtcggacgagagcgggcgtacgtgcaagatgggtcgaggatcggggaggctgttgggcctgctgcagccgggcgggtagcggcggagctcagcgagcgagctcccgaggcggaaacaaagcgagcctctgcgatcacgcacacctggctgccaagagggagttgctgaggagggccgccaatgctgcagactcggggacgaggctcgagggtgagggtcgggggaaaagggagaaacaacagccggccggaagaccgggagaccggccggaggggccggcagcgctctctgcttcagcccgccggccgctgcacctctcagacggccgtcgcgctcgtagtcaccgcacaatgctcttggcaagggacgggctggccagtctgcggaaggtcgggatcgctaatgatggtcgttcagaagctggagcttttcgcagaggagagagcaagacggccgttcgtccggcgcgcagcccctccgactgcgctgagcggcgaacagagaccccacagttccacagggcgagcgaagttccagtctaggagagtattcatacagtccaaggagggcacacaagcgagagacacctgccaagtcgcgtttaccgggccatccatccgccgtcaacctgaaagcagggagagggtcagtcaagccgccctttccccttggcagcctcgaacggtaagcagaacgcaacgcacagtgacacattcgccgcagacgtagtcgctgcccttgccggcaaggaagaggatggcggcggtaaagtcttcgggcgtgccccaccgagcgctcggaatacgctcgaggatctggcgcgagcgcgtcgggtcggcaatcagcgccgtgttcatctcggttgcgatgtaaccgggtgcgactatcagcacgagcaggagcttgtcgtcagcaagagacaattcagaagagtctatccagagtgaggaagatgacgcactggcgttgacgttgatgccgcggccggcgaagtcgttcgacatgccctttgtcaggccaaggatgccgtgcttggcagcagcgtacgcagggacggtcatgccgccctggaacgagacgagggaggcaatgttgatgatcttgccccggtcgtcgccgtctttgcgggtgtcgagcatgtgcttggcggcgtcgctggagagaggtgcaggcaagggtcagaggcggctgacgaagctacatcggcaggtccgaagctaggatggacttaccgagcgagggtgaagcaggtcgaaaggtttacctggatgacctcctcccagtcctcgtcggggaagacctcgctcttgtgccggcgctggatgccgccgcagttgacaaggatgtcgatcttgaggccgagctcgcccgtgatggtcgggaagacgttcttgacctgggccttgtcggcgaggtcacagacatagatgcgggcctggcggccgagtgccgtgatggcgtctcgggtcgtcgtgttctcctctgtcgtgcgcagccggcgagagagcagcccgtcagcccgccgtctgtcctgcgatacgacaacaggcacgcacctgagcgctggatgagaatcacgtctgctccggccttggcaagagtcagggcgaggttggcaccgatgccacgggtgccgccgctgtcgaacgaatcgatgaggcggagtgagctcgggtcagcctctagggagctcgggatgaaaatggctcgcaagggacgcacgtcatgaggaccgtcttgccatggaggccgaagagcgactcgaggaaggaggacatgctgaagtctaaagaggttaggagaaggtggtggtggttagagaggcgagagggaaggcaggtcgaggcgaggttcattccccccggccggaaccgggcaagccggcgctcggtccgaacctccttgtcgcaaggctggcgtctactttggacctttcgacgccagactcaatgctgctttcgtccgtctttgccggctgcaaccggaggaaggcgcctcgtctgcatctgagctggccgggccaagtagacaagccgggcctcttaagacggcaagggccgggccagctacgacgacccctccttctaacctacacctctccttctcatcacctcaggtaggttgccatcacctggagccgtgtctcgatgcgaagcttccagggctgaccctccgtccttgacctctcgtcgcaacccgcccggatcatccgcagcccgacttccatcacagccgtttccgtcttgcacgatgctcacaggaaccagtacgtcctggctcgttgacccgtagcttctttcgtctgaccccgtgcgctgctctcagtttttgagtcgtcgcacccaaagggcctcacggtcgaaggggccgacgtgattgtcaagatcgaaaccttccgtgtcgtgagtcgtcaggcgcctctcaatttgttcaaagcagctgctgacgatgccttctgcagctcccccgctggctctttgttcgcgttgagtcgtcttctggcctcgtcggctggggagagggtacgctcgagggccacaccgaggccgtcgagggcgccttcgaggacctccgccagcgcttcgtcggtgcgtaagacttgaattcacaacatcgtcgtttgctgtgctgacatagaaggccaaattcaggctggaacgtcgacaacattgaggacatttacgcgtcggcctaccggcaccgattctaccgcggtggacccgtcctgatgtcggccatctcgggactcgacatcgcgctctgggatctcaagggcaagaagtacggcgttcccgtctggcagctgctcggcggccgcgtccgcgacaagatccaggtctacggttggatcggaggcgaccggccgaccgacattctcgagcaggccaagaagcggaaggcccagggcttcacgaccgtcaagatgaacggcagcgagtcgctcaagtggctggcctcgccggccgacctcgacgcgacggttgagcgcctcaaggaggtcaagtcgatcggcatggacgccggccttgacttccacggccgtgtccacaagccgatggccaagcagctcgcccgcaagctcgagccccactcgcctctgtttatcgaggagccgctcctgcccggccagatcgaggagctcaaaattctttacgcccagacaacgattccgattgcggtgcgtacgggagagttaacctaagatccttgacttcttgactgacgcgagcttgcttgacgctgcagcttggagagcgcctgctcacccgccaggacgtccgcccttaccttgaggccggctgcatcgacattatccagcccgatattgctcactgtgcgtcggccgcagtgaaagctcgactgcgcgcgtcgctgaccaccccgctgttgtccacctgcagctggcggcatcaccgagacgcgcaagattgcccagatggccgagacgtacgatgtcggcttcgcccctcactgcccgctcggcccgatcgcctttgcggcctcgctccagctcgccgcttgcacgttgaattttgtcatctgcgagatgtcgatcgagatgcactacaacgtcggcaactttgacctcaagacgttcatcaccaaccccgaggtctttgacgtgtcaaacgggatggtcaaggtgctcgaggggcccggactcggtgcattctgcctgccttcctgcgccgttggtcggtcgtcgtcccccggtccgcctgagttgccgccgccgcctgagcggaaaggaaggccggaggatgtaagggtgaggcagacgtgcgatacgcggggggccgggggtatgttgatgggcgcgcgcggcgggccgggtggttggccctggcgtgaaggggtgggtggtccgacagggtgcaaggtgttggtacaatgaacgaaagtttccggatgcggcggaaggttggtaggactggcggtgacggcggacggtcgttcgtcggcccgcttgactacgtgagcaagaggctggcgagcgtcaacccgagggccgtcgagcccgcgagcgtcgtcaacgccgagctcgacgctcgcctcgacggcgacccagccgacgtcgacgacccggcgctcgcctgaaaggccgctgccctcgcccgcgtcgaagccgtgtacgaccggacgctcgcgagctcaaagccagcctcttcgtcgagcgagccggtgctgtttgcgccgacgtgctcgtagttggcgagccggaccgtcggcgaaacgagcccggcgtactgcgtgcaggcgttttgcagggctttggtttcgagaaagacgggcgcggcgaacatgcagcaggaaggcccggtcagctgaccgtgtctgagagaacgtttcgcgcgctcgcagacgcttccgctcggaacgcactcgtgatctgcgagctcaggtgggcaaagcgcgtctctggtattgagttctcgccgccattctgtcaagggaggagagggacattcgtcaacttcagcggggcgcgcgtttcgagggcgaggcgacgcacgaggagcaggcagttaatgcacccgagctgttgttcggcccgaaaggggtcagcccgatgcccgagcgaggagcagatcaagcagagctttccggcgacgcacgaaagagtccatcatctcggttgtgcagaagggctcgttgcagttcctggaggcgagggcgggagcgaggggaggggtcggggtgagcgagctggaaccaaacactggaggggaagcccgagcgaggtctcgtcgcgaaacgcactggacgatcttcagccggacgcaagtctgttgggatcaggcgcgaggtagaggtcgtcagccggctgctagatggggtcaatgcagaatgagtgttgagaagagggggcggaccgtctcgatgcctgtccaggcggtgcaggctggccggcagacgggcggcgcgagctcgagcaacgagcccgtccgggcggcatgggtcgtcacgcctgccgaggcatctggtccgagagcgatatggagcgccatgagcgtcgacgaggcgaaggtcgctggcgtcgccggcgggctggccgctgaagggttgagcgaaagaaagaccggcagcagtagagttcagcgacaccggagcgggtgggcacgcgcgtctctcagggcccttcctcgagcaacaagcccgaggtcgtttgtaggacgaacctatcgggcagggtgcacagagaaggaagagcagcgagctgaggacgatggccgacggcaggcgccgtcttgagggcgacgacgacgacgacggcccggcggcggaggagactgggcgcatcggagggaaggcgacgcgacgggaggttgagggaagggcggccgagaaggggcgcggattgatgtcggcttcgagcttgaagggcagaagaggacggtagtgggtggcggaagagaggagcgacgagtgcaggcgagaccttggccggggtgtcaggagtcagtcgaggagagcgaggaagggaaggctggcttcgctcgatacggcagggcgggaagggcggccagcaacccggcaggtctcgagcgtgcggcggcgcgcgcgtcgatcgctccccctcgttgacttcccacggcccggacccgtccacacctcgtcttgccgcagcaacgaacataaaaacccgcaggtaagccccgattcttgctcttgagctgctcagaggctcgctgcatgctactctgtacctcgactgctgccctccttcgcctgtccagccactctgtctgcatcccgcctgcactagccctgtcctcggctgaccctacgctgctcctttttgcctccctctcgcccagccttccccggccgtcggcgactgtaagccttccgaaaaaaaaagaaaaggcatctggtcggaagcgctccacgcgaggagtaagcggtggctcaaacaaagaggccccggccgccggcgggcgtggtcgacgaggacgcctgctgctggctgctgttattgatcggcttgtcgtgttgagtcaattgagggataacggaagccttgtaccaagtgcgacaaacatgcccgcgactgacgtcttcctggcgcggaagagggcgcccagcaactgatgcgctcgcgctcgctgctgctgcgtcgacggacgacatcgtgatctctctacgtgttgggcctcaggggtctctgctactggaacttggcgagctcctcaaccgagagacctccaaggacgccgcccttggtaaagacgacgccctcgagcgcctcgagtccctcgccggcgtacgagacgagcgggccgagctcgagctcgccgacggcggggccctcaacgcgtgcgccggcgcgctcgagccagcgccgctgttgggcgagcaggtcggcccggctcgtctgctggttgtcggtcgtcgagccgggcccgttcttgagcgggctgaactcttcggcccgctcgacctcgaggacggcaaagcgctcggcgaacgggaagacgtcaaagacaaacatctcgagcttcatgccgtttggcgtcgagggcttgaagggcgcacccgaggcgagatcgaccgtcggaatctttttgcgcgcaatgtggtacgccatctggccctcaaacgatgcgacccggtcaagaaaggcggtcgagtagaagtggttggcgatgttggccgcccggaaggcgagctggccgtcggcgtcgcggaggctggcctgcgccaccgggagctcggtgtactcgacgacaccgtacgcgccggccttgcgggcgacgacgccgaccgactcagtcggctccgtcttgggaacgactttggcgccgcattcggcctcgagcgcaaggttgtagccaatgaacgtcgggtccgcgacccggacgaggcagttgtcgacgccgtagcagtggacgtgcgcgatgcctcgctctttcatgatcgataggaccgaccggtcgtccgaggccgagagcggcgtccggagggcggcgtagagtccgccgttgccgtcgggcgcgaccgcgagctccccgggcgatgagagaaagattttgccgtcgtcagagaggcaaggaagcgtacctgcggccagaagaaggtaaaccgtcagacatccggtgaacgcagagagccagcgagttcgagaagcggccgagacggaccctgctcgaagaagatgacgttcttctcgcggaggccaaagaagcgatgctcgcggaagaaggcctcggtctcgcgccgagtcggcccgctcgtcatgacgaaccaggtgatggtgggccggtcagctgagctggcgctggcgagctgctcgagcttggcgatccgctcggcctgatactggaagagcgacttgccgctcgggaggccaatgtcgaagcagcccttgggcgacgacgagccgagccgcgtgccctggccgccagccatgagcaggacgcagacctcagaccgcgcaatcgcttcgaggccagccgtccgccacgacgccgtcttctcggctgagcccaagacggacgccgcgaccgacgctggaaggggctcgagctcgtccgcgggcgccgcgtccgaaccggccgccgccgtgccgttgagtacggcctcgctctcgacggcgtgcttgtagattcggttgacgcgctcgacgtcaaggccagcgagctgcttgagcagcgtctgctgctgggccggctcgagcgtcgggtagaacgtcaggacatggccctggccggcggcctcgtacttggctttgagcgcttcgtacgacggcgtcgtctctacggaaggcatcgtgagagggtcttgcgagtctgacaagctggggagtctgtggcgggcgaccagtttctggaacgagagagagagagaggaagggagggagacgagggagagatgtggtttggaggatgagagccttcagctcgagccgcccccccgcttttcgctgctgcgcggccctccctcccttcgtcgtcgacgtgacggctcgtcgtgaacttgtggccaggcgtcacttgcaaaccgggggtcgacgagccatctagaaaggcagtggccgaaaaaggaggagaatgagatggtggaggggtacgtgcgaagggccagacgccaagacagagcagagggttgggtattgagcagggaggaggagaaagggtcgtaaagagcgttgcgaggtcggtcgaggtgcggcagcagcaaggaggcagcgggaggatgaatacagaagagattagaagatccgagagggaggaaggcggcgagggccacgggcggctactcgcccttatagcgggcctttggatccgacgacgagccgacgtgctcgtgcgtgaacgtctcgtcctcgggacccatcggcgcaatctcgtccggccgaagaccctttggccggagcttctggtcggcgccgggcatgaccgagtagagaaagttaaggaagcgctcgccgtactctggcggagggacggccgagatcgcatgcttgtcctgcttgaggcccttccaaaagtgctcgagccgcttgacgagcgagtagggcgtgcaaatatcgatgacgccgaggtagtagatgacgtccatcgggatgttgcggtcgttggtcgcctggaggccgccctcgtcacggtagaagatgacgtgcttacggtcggcgagcgtctgagcgtcgagcgtgacatggcccatgccgtccattgcctgcggatccgactgcttgaccgccttgcgcagcgcccgggcgtcggccgcgtgctggagggccgacgatcggcgtcgcatcgtgccgggtccgcctgggtgggaaggctgcgagggaggagatgcggctccttgtgtcagcgcaggagcgagcgagcaaggccggtgctgcgaaagagcgcacgtcaaagacttgtagcgtattttgccggacgaggtccttattgccgcgctgcatgttgtggatgccgatcaagagcgagtagtcgaggatgttcatccgctggagaaagtcggtgtcgcgccggagctgctcggtcaggagcgcccgcttctctggcccgagccgcagctcgcgactccggcggacccagttgatgtccttcatgacggcgcccttcttgagacgggccttgtcctcggggtattcgcgtccgacgctcgaccctttcaggtcgtacgtctcgtgaatgtcgcggtggggcggaaagaggttgttctgcagaaggaaagggaggcggaggaggctcagctaaaaacgcaagggcgacaggttggcagggggaggcggcaccatgatgacaaagtgaatcttgggtccgcgcggcagcttgacacgatgcagcccgtagaagcgcgagagtagcgtgtgcggattggcgacgacgtgggcgtgatagtccttcaggatcgagcgcaggaagcggtgctcggtgtggctgatcgtcttgatgatgtagcggtagtcgcgcgaaaagtagaagaaggagcccgacttgcccggcgaaccgagctccgagaggatgtacttggccgtcagcgagagcaggtagtcggccggatcgagccgaaagtagttctgcaggtgacggaagcaaggctgcgtcaggtccagaggacaacgctccgctcagccttgtcgacgcacctctcgcaggtcgcgaaagacccaaggcgcataatctttgaacttgaagtcgtatcgcgtcgagggcgtgagctcgttgccgacactgcaaagtcgaatggcgacggccgtcagcatctgaagcccttcatgacgacgggcaggaactcacatgtcaaacgagtacttgtgctttgccttgaagtcttcaggcgtcagcgggcgcgaaatcttggcttgcgtccgcgagacctgacagggcgggcaaaaggggatgatgatcagcgacggcttgcgctcctctgggaagcccgacttacagcgatccgaatgccggtcagcatgtcatacatgaggacgtagttgacatgatcctcgccgacccagtttccgcctgccgctgaaggggaagtcacgggtcagcgaccgagagcgagaaagcctagccctgactgcccagcgtaaactgaccagacaggttgccgacggggaccttgggctcctcgctctgctggccggccgcgttccctgttcgagtatgcagcctgccctctcccgcaccgcccgcgttcgacgacttggacccgagccgcctccgctgaacaagcccccctaatgccgacgcctgctgcgacgggctgacccggaggaacgactgcaggcgatcctggtcaacatcggttgacggacgccggccgttgaccagcggcgagagcccctgagctggctcgccgtccgtcttggctcgccggccctgatttgctgaggcctcgtcgagcgaatcaggttctgccgtgatcgtcatcggctgcggcaaggaaaacgacctccggccatccgaggacgagccagatgagaccttctgcagccccgtccgaggcggagtgagcgcggccgtgccgccagctacctgcttgacagggacgaagccaagggaagcaaccgagccgtcggtgttccttcggacgacgggaggcaccgcccagggcgcttcgatcgtcggactgctcgaaatgggcgagtcgacaaagacggcgagcggcggcgcgagcggcgggagggcggtgagtgatgaggtcgagggcggtagtgccgacggcggacggtcaaagaacccggaggaaccagcaccggccgcgggatcggccgtcaagtcctgtatcgttggcgacgcggggcgggggcacggcgcgagggagggagagaggaaggtaaggcgggggcagccgatggtagttgacggagggcagcaggagcggcttggccgccgctcgtctgctcgctcgtccttgcttgacgaggcgacccgatcataagtcttctccacttccgcacttctcgcttagtggttcaatcaacgcgacgagacccctgatagcaaggcgcattctatgactaacggcctcctgagcgcatccacctaacggctgtcgcccccgtctggccgggcgccgttccgcagccggtctcttgacctgcgcgaggctcgatagagcgcaatgacggccggcttgacgagatccggattcggggtggacatggcgctggggaaagagagggtcggtcagccaaagtctctctgccgacaacgatcgatggcgcgaggacgcacgtcgcgaatttggtcaagaaggcctgcttttcgacggcgggcacgcttgatgccggcaggcggtcgacgattgtcggcagagcctcgacaacgagttgggggaagagaccggccaacgtccggaggatgccgacgaccatgccggtgctgtcttccgggtagccggtgacgagcccgccgaggacgaggccgaggaggtcctggccgcattcggtcagcgtcgcgcccaactgggcggacggcggttgaccaagcagggtctggataaagtcgagcgaggtcatgacgatctcgtttgacgggagcgagagggccgccaggcagagcttgaaggaggccgtgaaggccggcgacgagatcaggcggtcacccaggagcggcagcagctcgagcaggaggtggacatagtcgtccatgactgcgcgaagggaggtggtagaggggaagagtcagctcgcagagaagaattttgaggcggcaagcacagcggcgcaccgtccgggaagctcgtcgccgactcgcggttgacaatcgccgtgaagacctgcgtctcgcgctcccaagcctggacgaccttgctgacaatctcctcgtcaggagggccgccctcggccgccacaccaaagttcgtgccgagcttgccggtaatccagagatagccgctgatctggctttcctcaaagcaggttgacagtcggtcgatgacggccggcacgaccgaccgcgcggccgggccaaagaaggtgatagcgcgccggagtagtgcacaggaccgctcggcaatctgccagtttgatccgaaacggttaaggagcccgtcaatgacggcccagacctcggccggcgtggccgcacacgaaggaggcaagccagggccgagcgtccggaggacagcgaggaacgtctcgagctgctcgagcgagactgtgggaagaaaagaggagattagcacgtaagcattgcagagaagtggcagtcggacgcactgcagatgctcgtgatctcgtcccgaccgacgtgcgtggccgtcgagaggtcgtgaatgttctggacgagcggcatcgcaaacgtccggagggcggccgccacctcatcgaccggcatgtacgagaggacgaaggcgacggcctcggtcacctggatgacgtcctcgggcgagagtgacgggccaatggtcgtgaggaacgagtagagctgggggaggtaggggacaaggtgctgaagcataggtaagagttggtcaaccgtctgctcgggctggtcgtctcagcctgctcgaacgcgacccacctgcttgcagtccttgcaaaggtagcgcatgctctgggcgctggcggcagcgacctccttgtcggcgctctcaaagcccttgctgacgtactggaggcagaactccatgtgttccggatgctggtcaatccactcggtgtagcgaccgatgacgaggatggccgcatactggaccttggggtgggccggcagggacggcagaagcgacatgatgagcgggacggcgttgctgtcgtttgggtcgacctcggcacccatcgaccggagcgagaagagcggggcctcgatcgcctgccaagtccgagcagcgtcggcctccggtgcggccgccgtctggagcgcaccctgaattagctcaaacgagcgcttgaggcactcggtcgagccgaggacgtagcagcagtccttcagggtgtcgcccatcgtatgccggaagctccggaagtcgtcacgctcctgcgcattcatctcgccctcgtcggccgggaagcgaaggtggccgatgatgacctcgacgagcccgctgtagatctcggcaaacgggcgcgagaaggcgtcggacggccgcttgccgagcgactgggcgagcttgtaccaaaagttgaaggtgatcttgacaatctcgagctcctcagaccgggcacagatggcgatcgcctggacgagcggaaagaaggtctcggcatgctggaggatgagcggccggtacgtctcgccggcctcgacaaagatgcggcagaagccgcggagcgcctcggggtcgtcacggacgtcctcgctctgcagccgcggggcgagcgccaatacacgagggagaacctcctggatgacggccaggttgtcgtcaatctcctgcgtctcgtggatgaggtcgacgagaacgtcgaccgctgtgtcaaagagcgagtcgttggcgagtgcctcaaacgtaaactgaaagagcggcgtctgcgcaatctgcgacgtcgtcagctcgccggcgacgagccatgaccgcagagcagagaagacagccgcttggatcttcctgtcaatgcctgtcgagcgaaggtcaaggtcgcgagaagcccaggggacgatcagcttgcggtccgcctccggctgcgctcgagacaaagacgagccctacgcacctggcgcgacgatgtacatcgccaacaggccgagaacctcttgagccgagctgcccatcatgtcgccgagcctgcgctccatctcgtcgctcgcgacgacaatctttgggttgccggcctcctccggcaggacgcgcaggaactcgagcaatgccggtaccatggcgacgtcctggccgtagtcggcgatcaggccgtggacgacgttgctccacgacatcatctggaccgctagatcggccagagcgaggcagacctggatcagaatcggtcgaaagcccggggccgagaagcgtcgcagggcggtaaggagcgacgtccgcaggccctggagcgaaagctcgtcgagctcgccaatgtcgtagatgacctgagcggggcccagagagacaggcgtcaggaggctgagcaaaagctgacgcaaggcccacatgaccggtcggcgtcgagagagatgaggccgacgcaccttggctctgaaggtctggccggcgaacatcttgacgtcgaggccgacatgctcgtcaaagagcaggacgtgacatgtctcccaggcttccttctgcagcaggccgacgagtgcgagctcatttcgtcagtgtccagagcttaggatgcgaagcgagcgcgtcaagacggaccgagtgctggaacgacgtgagccagtcgttggcggcgagctggaccgagcggtcgccgttggcggcagtcggggtcgagagcgcgtggagcgcggcgatgacctgctgggcgttcggcggaagagtgggagctgtcgtggccatgggcaagagaaggacgggctggaagaggtgaggaggaaggaaggaaggaaggaaggaaggaaggaaggaaggaaggaaggaaggaaggaaggaaggggggtgaagggtagggtggtcgttaacgaagaagacaagtcgagctcgtcctccttgagcccaccttgcgaggccctgaccacatcccccttcgcgaccgcacaaagtcttgagagcctgccctactcgccagcttgctgctttctctctctcttttaagcgactcgagcttcagcacctacgccccccgtcgtctccatcggcatgacgtctcgtctgccggcgctgctccttcggtcgtcccaggtcgccccgcctgcggccagtcggtccttcggctcctcgccgggcctgctcaagaaggcctcgctcacgtccagcgcagagcgcatcatgaacccgctccgccgaacgtcgactcgcaagtttgtcgaagccctccgccgacaggacaacaccgacggctacgagtcggagcgctacggccagacctcacgcgccttctcacccaagctcggcaagccgttcgccaacatcgaccagtggccgccgccggccaactaccggggcaaaggccacaagaagccggcgatggcaaagacgtcgttgctccagaaacctcgctggcgggagattgccaaggaggacgaggtcgagcctgggtggacgcgggtcatgccgccgggtgagggcaaaccgctcgccgattcggtccgggcaaagggcttcaagaaggtcaagcattatgccggcggtagctcgggcggcgtgccaagttggatcatgcgcaaggagcaggcccgactcgaggcagaggcacgaggcgaggttgtcgaggagcgcgacagccgtctcggccgccgctcacccggcggccgagcgaccggcaggagcgccagcaacggtcgtgacgaggcagcagcacctgtaggacgctcgaaatcatacgacagggcagctgggccttcgtctgcccctcgccggtcgtttggcgaccggatcggcacgagtgcgttctctcgcacacataaccgcccgccgtccgcaaggctgacgtgtcttcatgcctacttatatccaggtgtcatgaagagctttgctcaggacctaggtcttcggcctgaacggccgcagagagactcttcgacgccatcgcccgtgcagcgtttcacggcccccgtgaagccttcgcaggcccagaggcagcgcgagcagcgatagcatgtcgtgcttgccacgacccgtccagcaatcagaaagggcgtgacgggcgccttttcgacagaaaggacggcgtgagacgcaaggacatctattggacagaacgcgtaattgaaaagactcgaagccccccccttcctcaggcctttcgccctaggagtcccttcgggccgaccgtcagccgaccttggaccctagttggcctggaggcgcgcttcagtagatgcgcttgccgctgacgccgttgctctgggcgatcatgccgcgcgggttgttcttggtcggcatgacacgcgtgccccgcttgatggcgcacttccagaagtaggagccgtcaaagacgccccggatgtcctccttcttcatcttgccgtcctcgggccagaggaggatgtaggtgttgccccacctggtgggatgcggtcgagtcagcgaagaggtgcgggtgggcaattagggaagacgaccgggacgcactcgaagtacatggcgacgtagccaaagaagtcgaaggcgtcgctctggcgcgagatcatgtcgcggacctgcgaccaggtcatcgtgtcgtgcggggccggcgtgtacagctcaaaggcactgtgcaagcagggcaacgtgggatcagtacaaaatgcagcgagcgctgtgtgtcgggcggcgacgcacaggttgaagcgcgactggtcaaagtcgcccttcttattgtacgactcggtgtcggacccgtgcttggccatgtggatctgcaggtgcgtggccgtcagtcaaagccagtctatgagacgctaggagtcaagacggagacgcaccttgctgacgtggagccgcagcttcgggtcaggcaggaggccgaaaaaccaccgctccgtcagggcgagactggcagccggaagtgaggccgaggaggaggacgcgtcagcgaacgtaaccggacgcgctcagaggcgagatgcggacgaagaggcgtacgcgaagacgacgtggacgatgcacatgctcgcgatcgagacaaaccagccgtagccgaggtcacggaagccccagagggtgtcggttggccaaacgatgccgtcgccgcggcggtcgactgcaggaggaagggcaacgtcaacacgtgaaagccttggcgaccgacccgtccgaagctcggtcgacgcgacattgctactcacagaaagcggtgtggccctcgagctcggtagccctagcggcaacagcagagagaagggaagagaggatggcaaaatcagcggtagagtcttggccggctggggcgtcgcgacgcgtcgcaaccccttccgacgccacactcggagaggacgggaggacgcactcgtcctggccgaacacgagcgggatctcgcgcgcgccgccctgcttgttcttctcgtcgccgccatggacgtagccgtttgtggttgactgcttgctgttcagattgcgggccatcaggccgttcgtctccttggggttcgtcctgcggcaagggagagcgagcgagagccaaccgcggtcagcccatcgcgcgtcggcgggacgcaggcggtcctttgaaagcttgcgaccgagcaacgagcaaacgtgccggcctggtcgctcagggaagagtggacgcacatgctcgtcactatcgtgaaaggagaaagcgaaagcgaggggaagggcggtggtcgagggtttgatgaagcgagcagccgctgctttcttggcctcgcagcagcccgatccggcgccgatccgcatggccgaagccgagccggccgtcgagctcacccggcctcagcccaaggacctcaaggacagcgaggtcccccacgagtaccagggacggtcgactagcctgctctggctgccaagaactaccgccgtctcgaccccgtgagaggaagtgagcttaatgatggcgtgcaatgcgtcggctgcgcggctccgcccgctggctgccggctcttccctccctccgagcactgctggctccagctggccaacctccaatcgcgtcgaggtcgacgctgcaacagatgtcaagcaacttctccttgcgatattacctttgtcggtcctcgacgtgtacttgtcagggagggaacgctgagccagacagctctaggcaggcgcggcctgcaccttcgaaggttacttgcctccgccgaatttcaagtattcgcgcgcccgggaggaggagctcgttctgccttgacgccctcgacgagacccatcatcttcaacctcttcccctctcatctttcttttgtcacaatggaccaggctaaactcgctcgcatggctgctgccgtccgcgtcggtgcgtcggccctcctgctctgtcgaaccgcccagtcgtagcgagctgacgccctgctcgtctcgcccttttcatcgctgccctgctgctgctgctgctgcttgctgctctcacgacctcgtcctgcgtgctcgttcgccgccgccgggatctgtcctgcccatctctgctcgtcgtgctcactctccttaggcggcaagggtaccgcccgcagaaaggtcatcaagaagtcggtcgcctcgctccaggccgacgacaagaaggtccaggccgcgctcaagaagctcaacgtcgccccgctcggcggcgtcgaggaggtcaacatgttccaggaggacggcaacgtccttcacttctccgccccgaccggtgcgtcccttgctgccgtgtcctgctcgtcgtctgtcgaagctgacctccagctcctcgtcatcgctctgctgctgctgccgtccctatgctcgcagtccacgccgccatcccgtccaacacgatggccgtctacggcaagggccaggtcaaggagctcaccgagctcgttccgggaatcctctcgcagctcggccccgactcgctcgcctcgctccgcaagctcgccgagtcgtaccagcagatgagccagcagcagcaggcaggtgcgtagcttcatcgcgcgttcacgcaagaaatgctgctgactctgccgctgactgcctcgacctgaccctttcgtccgccgctccgcaggcgagaagaaggacgacgacgaggtccccgagacggccgagaactttgacgctgttgaggaggccgacgaggccaagtagagaaagccggccggtcttgccccgctatttgaggctcggttttcgtgtatgaaaaggcttgcaaaacgtagacctcgcgctgtatcatgggttgctgagcagaaagcgaaagcgtacgcatgcgatggccaaagggccacagggtcagccggcctgtctgcggctctggcccccacgggcggccggcgggtttcgtcggtcaaggcgagaaaacgggcgggcgcgcggcagttggcttctcccctcctcgctccgacctcgaccccccatcacctcccgttttctctctccctaccctcctcctttcccaaaatgatgcgctcctccctcctcaaggcggctcagacgcctggtgcgtccaacctttcgcgctcgctctcgaacgagaccctctgcagacccgaccgtcgagcatggactgaggctgattttgcccgcccgaccttcttgctctgcctcgatagccgtccgccggtcgctctcgacctcggccccgcgctcggcctacgaggacacgctcaagaacctcctcatcaacgccgacaccaaggtcctcgtccagggtttcaccggcaagacggtgcgtccatcacagcgagcgcgcgcgcgacggccgacaacgcgcgcggctgctccttcacagcctcctcctctgcctgccagaacccagcgagccaggctgctgctcttcgtcctcgaggctgacgcttccggcttccttgctgttgtgcacctagggctcgttccacgccgagcaggccatcaagtacggcaccaagatggtcggcggcaccaaccccaagaaggccggacagactcacctcggcctgcccgtcttcggcaccgtgaaggaggtgaggagcttcctcttgctagcaggcgtccttggcaagctctctgagcgtgggcgggactggcgactgcctttctcacacggcaggctgcgtcgtgtcccgtcccactggctccgggtcgcctctgcatctcgccttaactctgcacaacaggacggctgaccgatcgctgccttcgctccaccccttctatctcgctcgcaggccgtccgggagaccaagcccgacgcgactgtcatctacgtccctcctccgggcgctgccgacgccatccttgaggccatcgaggccgaggtcggcctcattgtcgccatcaccgagggaatcccccagctcgacgagattaagatcatggacgccctcaagtcgcagtccaagtcgcgcatggtcggtgcgtcgtcggctgctattttctgccttgctcacaggcttgcagacctctgaccgtcatcttggtctcgccccgacggcaggccccaactgccctggtatcatcgacccccgtggctgcaagatgggcatcatgcccggccacatccacatgcccggaaagatcggttcgtcgagcgcctgcttgtcggctggacctcctgcattatcctgtgctgacctccctcctccaccctccaggcatcgtctcccgttcgggcaccctcaactacgaggccgtcgcccagacgaccaacgtcggcctcggccagtcgcttgtcatcggcatcggtggtgaccccttcccgggcacgacccacgtcgacgcccttcgcatcctgctcgacgacccccggaccgagggtatcgtcatcatcggcgagatcggtggctcgatggaggaggacgcggccgagttcctcgagaagcacaacaagacgcgcgcgaagcccaagccggtcgtcggcttcatcgccggccggaccgcgccccctggccgtcgcatgggccacgccggcgccatcatctccggaggtcagtcaccccgagcgcctgatctgacctgactcgacttgacgctgacgcccacatctcaaccctacaggcaagggtgccgctagcgacaaggtcgaggccctcgagaaggctggcgccatcgtcgccgagtcgcccgccaagattggtgccctcatgctcaaggtccgtcatcgcgccgcacttggcaactgtaatcggcgactgtcgttgactctccctgcatctttccttcaccaggccatgaaggacgctggtcttgcctagagcggccgatgcgccggtcgcgctcgggtgtacactttacgttccgcatcatctagacgacgcgagtctcaatactcttcacgaaaaccctccctagtactcatcaggatgatccccgtttctctctgcctctgctgactggacgggtagaaggtgcagcggggaaggtgaagctgcacatggacctcagcgtattcttcggccgcctacgaggagaatcgttacaatctatcgtccgtggtggactgtcgggaacgcaatactgagggcgaggcgtaggcttgaaacaagcaaaagggtaaggatgctctcgggcaggagggtacagcagatgcagcgattcgcgtcgtgaaagatctctccagcattcaatgcgctggttgccctagttgacaattatgattatacatcacaaccttcaatcaaggcatgaatggtgtagtggtatcacgcaatgttagggtcgaagtctcgcttcattgaggtcctcggttcaatcccgggttcgtgcccatcttttttttgcacttctgtcagatcactttccctgatacaatctgcccccattacaacatttctgccgctcagcgatccagacatctgtgtcaaatgagttttcttgtcgtggtattgagccttccaccgagagctgcagcctgggtattctcattcttttgccccatcgcttcagcctttttccacccgcagcgagcgttatgtgggagctcctctccaaagattaacacgtccttgtgcaccgcgagggctctgtctctaagtgtcggtcatatcgcacatcaacattcaagtcgtcgtgtttaatgttcgagacggccggcacccccgtccgaggtaaggaaagccctatgtcggtcaatcagcgttggtttcatgcgcagctgcagccaacttgtgaacaatcactccttctcagccgattatgggttctcggtagctaatcttggcaggagatcggctgagtggtcctcagtgcttgcttcagcatgccattggcttttggtcggcgaaggccgaacccatggacgcagctcgattggttcacggccgaagacccgacactcgactacttacagtgccactttccccctttccaccccacggagtccagtctccgcactttcactcttctccgagccgatgctcccgctgtggctgaccagctggctggcaagtagcctcgacctcgtccgcgagctactcctgcgctgcgcgccgcctgcggcagtgccgaccggcacgcgagtcgagtgctgagcgtcggtcatcatggacgatatgcttctcctgcttctattcgctagaatgtgcctcgcagagattgaggtgaccggtgcgtgagagcggtgtcccgtagaacgtgtggaagaagcagtgtcgtggtggtttggcgggcgtgcgggcggccaacgccaacgcgcagcctcccgccaattaaatcgtccgtaaccccgcgtcaactttcgatcgggcagaatcctctcgagtcattttgcctggccgaaaggttacgctcctcctacaccttccttcagcctgacgctttgcttacaaccttagcctctctcccgcgccctttccacctcttgcgccacagaacgtcatttcatgtcaggcgttcacccgactgtctgtatccccctgaggaccgtgatcttcagcagcacttgtcggccaaacagcgcactcagctcgagcgctggagcgccagcgacagacaaccttcgtttcgcgtgagatccgtgttgcgttcgaaggccaggtcagtttcgccgcttagtgaccacccgtttgcgggtgcttacgctaacaaatcttattccatacttgccgcaggaaaaagccgtcgcctgcgtcacgtgcaagattgtattccagtcgacgacaacgtctctctccgctttcccgacggcgtcttaggcgtgggtgccatgcacatcgttgcgctcgagcagatccggaggtaggtcggcttgctcaagcgcgaacctcttctttacgtgctcgaccggacgaatcaggctgcacggcctctttttgaggagcaggatgacgcttgattcattctcatgtagcacatgctcatgactcggccaaggtgaacgcaagggagacgaggcacaagaaacgacgagcagctcaagctgcagtctcgaaaggcacacagggggaagcaaaaggcgccatcaattgctggcacttgaagatgcaggacaggcagcaataggaagcgaaaggtgctttgacggcaggcgcaggaacgtactcagagcacgttccggcgtccaagaagcaggccgcgccgtcctggggcctcctgccccaccaggccgccgtcgctaccgagtcgtccactcgagtatcggttgttgagtccaaggggggaagctgccgagtcagccggcgacccggtcagtcaagcacacgccggccacgatcctacctctatgtcgagcgtccaggctttttcatctgagtgccggcccaggaggtctttcagctccacgcgtcagtcgccagcgcagatcagcaccttaagtcaagtgaggacttcatggcaagaagagcaaaagaaagtacttgccaagactggtttcgatccagtgacttatgggttatgagcccatcacgctaccactgcgtcacttggcagttgatgtcaacagattggcaaggaagaacaattacctgtctttgcttgcagcgcaccagggacaacaacatgcgagtgtgcgctgtttcttactgcctgctctggttactcttttgatagctcgtccccgtcgacctcatcatgactcagcgcatgagacgatcgcatcgtcacagtatcactggtaagaagaattttctagagctctggcaacctgcgctcgccatacagaggaccttgggggtacttacactcgagggaggcttgcaagagtgggtcggtcgcgccggcttatcaccggcagcttgcagaatgaagccggacgaaggagaggcccacgcgtgagatatctgaaaggcgttctgacggcccggcggcggcggatggcggagggatctcaggccaacctgactttcgtacctaatgtgagcgcagcgtgcacggtgcacgccagaaccgtcgatgtgatcgaagacaggaagctcagcagggagaaccttgtctgcgggcgaaaagaatgaaagcgaagtcgtacagcaactcagcaatgctcaagcagaaggctggggttttcaagatcaagctgcaaggctgagctctgctgaggctgcttcggctcggactgaagtcgacgtgacagacgggttgagaccaagcattctttcagcccggccgccctcggtggagggtgggagggttttgaccgggttgacttctgtccctgaaagcgcagtccacgaacggtgagggtttgcgaggcgcgaaagaagaagggaggcggaggagcgacggcgcttccggcgacacctgaggaaggagcgcgccgccgacacgaggttgacgccttgtcgacggccagcgaccccgcctttgcaagcgttgaacgacatgcttcgttccattacttacgccgacgcctcgtcgagatgctcttggagggcacgctcgttgacgccaagggtctcatcatctgcgaaagagagagagcgagctttcgaaacaccggacaccccgattgaaacgggtaatcagatatatccatccgttttggcgtgcttgatggcggcaaagataggagccgagttgctgatcgactggcggcaaatggggcgtatgcggtggaaactccacggcgtctacggtgtaggacgaggcaggaggcatggccgactcagtctcaggactactccgtgaacgactggggtttaggagggggagcgagcgggcgtctagctaagaggagggagcgaagagagagaggaggaagagaaaggaggaagagagaggaggaagagagaggaggaagagagaggaggaagagagaggaggaaagagtccggcggactccagggcgtggcgcccgggtggccgctgggcggtcgccaggagctgacggtgcgcccagtttcccgcgctgcaccagccggcgccggcgcagcaacaccttcaacacctccccgcaacctctgcatcattgccgccgggcgagacgctgcaggtcgccgaatcgatggtatgctggcgcagcaaggggtttcgtcaggccgtcgaccggcatctggtcggtcgatacgtaggtgattttgaagtggccgcgttcgacgcgctgtcggagcccgtggtagatgacgtcgatgtgtttcgtgcgcgggtggtgcagcgggttacgcgcgagcgcgtttgccccttgattgtcgccgtaaagctcgagcacctcatcgtcctggctggcgccgccaactgggcgccccaccctccctgccagacgtcgacacctgggccgtctccccgcgcggcgccggctggctcttcggctcctccgtcacgcacgaattctcccatctcaacgggctctcgctcattgcgcgcgcgcaccagctcgtccaggaggggttcaagcacatgtttgacgagaagctcgtgactgtctggagtgcgccgaagtgagttgcttctcgatctctgccgtccctcgccgacgaatggcgtcgggagacggacgggacctccttacgtgccaatccaggaactgactccccctccccctctctgtccgcagctactgctaccgctgcggcaaccttgcttcggtcatgcaagtgaccgatggcggaaagacggcgttcaagacgtttgacgccgcagtcgaaaacgagacggacgagcgcaacccggcgagccggagggcggtgggtccttccttcttctcactctttgtcttttccgccgccgtcgtccgttgagcgcgggctgacgatgctccttctacatctcgtcagggcttgccgtcctactttgtctagagacccctctgtcgcccctcctcatctctctgctcgcttcaccgccttgtacctgtattctctctcctcgactgcggtctggcgccttcttcgacccgccgcttggacttgtcgaagggctcttctgccgccaccgccgccgtcgttcagggcgtgtcttgtaccacaacccttgcatttgttaggccctgcgaaagccgccggcgctgaaagaaggggaggcgggcccggccggaggtggacggcctttcgggtgctgtcggtcgatcggagggccgccagagggtcgaaaagggggccccgggcgagcgggcgagaaagggagagacgcgatgggggggctgtccgttctgcttcagtctgtcaaccatcacccatccccgaactctccttgcccttctccttcccttcttcttactctctcgcaaaaatggtcaaggccgtcgtcatcggtgccggtccgtcactctctcgagcctctgcgcaaggcagcgagagtctgtgctcaacgacccgcgcgaaccctgacactctcgtcctccgcccgaccgtcccctcccctccctggcgacagccggcggaatcggtcagcccctcgctctcctgctcaagacgaacccgctcgtcaccgaggttggttgctctttcgctatccgagaggaaattggatgctgaggcaggcgctgaccgttcccgatctggattgccttcgctcgcctctccccatctcctccttccatgctccctccagctcgccctgtacgacgtcgtcaacgcccccggtgtccgtcccttccctgccctctctcccctcttcccaaccggagctgaaccggccccttctgcctgttcaggtcgcctgcgacctctcgcacatcgacacgccggcccaggtcgtcggctacctcccggccgacggcgggctcgagaaggcgctcaagggcgcaaagattgtcgtcatccctgccggtgagcacgcgtcgcgcgttctctttcctcgacttgaggcaagcgctgaccaatcttgtcgcttgcgtctgctgcgactcaggcgtcccccgcaagcctgggtgagttggtcgttgttcggctcgccgggccgagccagtaaccgcggcagaggcgggcgctgactcgtccttctcctcatctccccttttcctcgctcaagaatgacccgcgacgacctcttcaaggttccgtccttcccctcgatcctccgcttccagcgtaacccccgtctgacgcctttccgcctctcttccgcctgcagatcaacgccggcatctgccgcgacctcgcaaagggcatcgccgcccactgccccgacgccttcacgctcgtcatctcgaacccggtcaactcgactgtccccgtctttgcagaggtcttcaaggccgcgggtgtttacgacgctaagaagtgcgtctccttccgccgcaagtctgagatgtgggcaaggtcatgctgacgcctgcttctcctcgccgcggttaggctgttcggcgtgacgacgctcgacgttgtccgctcgtcgacctttgtcgcctcagtcagcggcaagcccgagaaggccaccgactgtgcgtccctcttcgttcgcttccccatctctctcgtcgcccgctgctgaccttgccctgccgcgcgtagacacgatccccgtcatcggcggccactctggcgtgacgattgttcccctgctctcgcagtcgtcgccggccctgccgaaggacgtccttgaggacgaggcgaagctcgccgagctcgtcaagcgcatccagtttggcggcgatggtttgtcctcggtttgctttggctttcggcttgatcacgacaacggcgagactgacgtgtccccccttttttcgtagaggtcgtcaaggccaaggacggcgcgggctcggccacgctctcgatggcctacggtccgtctcctccaacttcacctgtgcacgttcgacgcaagagagctgactcgcccccctccccctcctctgcctcagccggcgccaagttcgcttcgctcgtcctccgggccgtcgtctctggcgagtcgggcctcgtttcgccctcgtacgtcgcgctctcagccgatgccgccggcggcaaaaaggttgtcgaggagattggcggaaaggacctcgagttcttctcggtcaacgtcgagcttggcgtgcgtactccttctccccccccctccctcttcgcctgccactgcttgcctgtcgctgcatgcctttcgctgacaagcctgcgtcttgctcgacccttagtcaaacggcatctccaagatcctcccgatcggctcgctctcggcgactgagaaggcgctgatcgcagagtgcgtgcccgagctcgagggctcgatcgcaaagggcgtctcgttcatcaaggatgcgtcgaagctctaagccgattcagcttccagcttctctctttggtcactctgtctcctttgtaggtctgcgattgaacgagactcctgttctgctgttggggtgcgtctacgcgagttcggaagctagcagagttgcacagggagcgagcgacgcccactgaaacaagggcgggcggcggtgatgagacggacggccgagaagctgccgacagtgcgtcacagggaagcctggcgaccgccctcccccgcaagtctacgctggtgagggcaaaggaggagggcagtgggattggctcggaaccctgaagagcggcaactcactttgaggcgaaaagatcatcggtatgtgcctgcctgccccccactctcccctccttcacccacgtcgcgcatcgccacttgccctttagtacacgccgttctcagtgtagctcttgttgtagcccgggtaagcggcggggccgtagccctggcctggagggggcgagatgtcctcccacttcttgcgctgaaggtgccgggcttcgagccgctcgtagcgctcgagcgcgtcgtcctctttgcggacggacgagccctgcgtcgaggggggaagcgacggggcgtcagctagagatatgaggcggagggaaggaggaaaaggcgggacgaacgggagggacggtgtattcgtaccagcccatgacgggcgcgccgagcatgcaacccgcaagggcaggaacgagccggccacctgttcaacgcaacgcaggacgaaagcagaccgttagtcttggcgcaaggccagttgcggtctccttgctcaagcggtcgggaattgggctttgtatgcttcgagaggacttaccacggaggccgatgaggaaaccggcggcacagcctccagcagcagcgctggtccagtggtccttctgcaagacggggacaacgagcggaagcggaccgtcagacgttagtcgtttgagctggcagctcgggggcgagctctccagcgtctgcggctggcgggcgagcaggaacagacggacctgccggacgttggcgacgacggcccgcgtcgtcgcataggcgggcatgatggcggctgaaggatcgtatcgtcgagcgcaacgagaggaagagagtcagcctcatcgagcgttggctggcgtgctgcttgctgccgagctggcaagctgctcgccgagcagggcagagctcgaaggggacgggacagactaaagaggccgatcgtccgtccgtactgggtgaagatgggcagccactccttgccccggttgaagtatgcgttctgcagcccggggcggaacgacggaagggaagggacgtcagcatgagtcgaagccacggccaacgtcgggcgaggcgaggtgaagctcagcagagctttgccagcgaggcggatacggacctggaacgtcgcgccaaagacaccgacgccagcgccaaccagggccgccttccaggtgatgtagacgacgggctttggctcgtagataacgccgtcgagcgaggctgagggctcgacgacggaccggatggggaacatgacggacgaaggcagcggctgagcgtagatgccccggctggcggcgagggccgcgccggcggtcggtccgctgctggatgggcctgctgacgaggacatgcctgctctgcgagagaaggggggtcggttggtgagggagggatgggagagggcgggcgagggtcggagggagggtcgaaggtccgaaagccctgcagggattgggccctccgcgggagggtcgtgcctcacgcttgggattgggagagatgcggccgccgcgccggacgacgggccggcaggcaggcccagcaagacgataatgaagagtccttctttcttctcccttcacgctctcactccaatgtcgcacaggcggctagctttcctgagatcatggcaaaagggcaggctcgatagacaagtgaaggggagggggagaagctttcgcgcggcgcatctggcagcgcctttcgcatcctctccactcctctgacggacggccttgggccgacttctacctcgtccgcccgaggaccctacctgcgcaatcagacggtctatgttgaaggagccgcttgccgacatcgcgctggcgctgtttctgccctccgaagggctttgcctctgtcgtcggccgtccaacaataccagctggaccgcgagtagcgctttacagcctccgtcaaggtacgcttcaaggcgcgcgagcggcagcttgggcctttgcaaggtatcttacgctcaacggtcggcatgatgcgtctctgcgtgagcgatcgtcggaggcgcggcaaggctcccgcaagctcggggccaagatgagcagcgatgcagggagggtcagcgagcaggctggtcgaggacacagagagactcggtcagcgaacccgtccccccccccccttctctgtgcatgccggtctgtcggtagatcgtggtcgtcgtcgggttgtcgtcgagaggatcaacgtcggcttgcttggccgcgcggagagcgtcacgggccggctctgcgcagccgaaccgacctcaagtgcctgttcgggggatctagctcatgcctcctccctcttggagcgctgaaaaggctactagagacaggacagaagttcaagctaccttgtccagggctttccgttgtttctcgagaaggctgacaggcgggagagccgtcgcgaggctgcatgacgtcgtgcctggcgttcgcgcggatggacgccccgccctccggcctctctctttcagcctgcgcccttcaccccccttccccttctcgaccttctctttttcacaaccactatcctcgctctactcgcagctcgcacagcgtctctgccatgatcggatctcaccgtgtcctcgtcgcctcgctttgtgagtcgcgccctgcctctgccccccagccatcttgcccggccctatcgctctccccttctgcgccatcctcccttggcacaacgtgcgcttgcaggcccggcaaccctcacggcgactcctgctgaccctctcttgacgcccttcccacagtcttgcctgccggcatcgagtttgacgccgccccgccctcgtcgccggccctctcgtcccagggcggagccgagcaccccgaggtcattggcgaggacgaggagctcgtcctcccctcgagtgccgaagcgccggtcgctcgtgccgggcttgacggtggtcggccgtctcttgagcgggcgctgaccgaccggggatcgctcgctgtcggaggcggtcagacgccgggcctgaacggcctggcgtcgaacaagggcctcagcatcattgacgaccttcaggtgcgagccgtcatctttgatcgctcatcccgaatgagagccctgacttctcgtctcccacaacaaggcccatgccaacaagtcgcctgcggctacgccgaggcacgagcccgcgaccaacccgtttttcccgaccgcgcccgctccctcggccggcacccaggcgagccaagccggcagcgccgtcgccggcgccatctcgtccgttgcaacggccgctgcccgggcgctcaacctcccgccaccgatgacgcgaggcaagtcgacgcgtggtatcccgtccgagatgagcctgccaagctcgccggcgagtggtcattcgggtgcgacgagccctcgccagccgtcggctgcgagcaagcatgcgaacccaatcgtcgatcgttcggccggcaagggcatgggtgctggtggtcagcacccgctctcgtcgacgaccgctgccgctgctgcagcgtcggatgtcgaggagcccgggtcgcccgtcctcgggacctcgacccctcgccggctgtccggcacttcgccctcgatccccggctcgccctcgttctcgaccggcgggcccaacgccggcaacgccgcgagcggtggtggcacgctcggccggtcggcctcgcgctcgtcctcgcgccgccggtcgacctcgcagcagacgttttcgcaggcccagcgcgagacgctcaagacggtcaaccagttccacctcgccaacaacccgcagggcaacattggcctccagaatgcgctcaatgcgatcgaggaggagactaagggcatcgtctgggtcggcgccctcggcgaccggaccgacaactttgacgagagtctccgcggggagattgacgaccggctctggaagggcgtcgggccggcccggccggacgcggtcgagcgccgggctcgggcagtctggctcgaggacaaggtctttgaaggcagctgtgagtctctgtcgctgggagtttgcggcgcgcaagagggctgacctctttcccttgccgcccatcgccgccagacgacgtcttttgcaagcagattctctggccgacgttccactactcgaccgtccgcaaggacgagacgactaactgggacgactatgtcaaggtcaacgaggcctttgccgaccgactcgtcgagactgtgagtggcgtgagccgtctgctgcctttggcagattgttgaagctgacgcatccgctgcctttagtacgaggacggcgacattatcttcgtcaacgactatcaccttctgctcgtcccacagctggtccgggccaagctgccaaaggccatcatcggcttcttcctccacattgccttcccgtcgtccgagattttccgctgcctcgcccggcgcgaggagcttctccagggcatgcttggagccaacctaattggtttccagacatacaacgtgagtttcgcgcgagagccctgctgctcgacgacggctgacactggatcgtgtgccgcccgcagttctcgcgccacttccgccagacggtctcgcgcgtgctccagtcggtcgaggcgacgccaaagggcatccaggtgggcgaaaattttgtcgacgtcgaggtgtttgggatcggcatcgacgtcgagtcgctcgactaccgccggaaccagcctgaggtcgacgagtgggcgacgtcgctccgcgagcgctacggcgacacgaagatcattgtcgcccgcgacaagctcgacgaggtcaaggtgcgtggccgcaaggaatacgatgtattgcgcgtatccgctccactgaccgcttctgcaactctgcgccgctccatctctgcagggcctcaagcacaagctgctcagctttgagcgcttcctccagatgttccctgcctggcgcggcaaggtcgtcctcatccaggtcgccctcgcgacgaccgagacaaacgaggcccaggagaacatctccgacctcgtcacccgcatcaactcgcgcttctcgagcctgacgtaccagccagtcgtcctgctccacaccgagccgccgaccttcagccagtacctcggcctgatgacggccgctgacgccttcatcaacacgagtctgcgcgagggcatgaatctaacctcgcacgagtttatccgctgccgtgcgttgctcctttctcccgcgttggttcgttcgtagctgactctgtgcctctcctgtcttctcaaccgcgttccacagaggagggcaagcacggcgcgatgatcctttccgagtttaccggctcgtacagccactcgtcgttccagtcgtgcctcccggtcaaccccgtcagtgcctccctccctcggcagatgatgcaactgctgcttccctgctcagttcgctgacggccctctcccttgacgttaccagtacgactacacgcaggtcgcccgggcgatcaaccagggactcgaaatgtcgtcgactgagctgacagcgcggtggaaggacctcaacgcccacgtcgtcgaccacaccgcccaggcctgggccaaaagcgcgtccctcgtctcacgagatgccctcttgcagctcgtcttgctgacccgccccttacttcgccgcctgcagagttcctcgcccactgcgagcgcgcccacgccggccagctcagccggacgccgggcgacatcccgcacctccagctcgactcgtttcagaaggacttcctcgccggccagaagcggctcctgctcgtcgactttgagggcctcctctggaacattgacccccgcgtcacgcatgccgagggcttcacgcctcctgccgacttggtcgagctcctgaacgacctgacgaaggacgtgacgacgaccgtctaccttctctcgggctggagcaagcccgatctcgacaagattgcctcgcaggtgccccggctcggccttgtgtacgtccccttgttcagttcgctgcctggcctgccccttgctaacgctgacccttgactgcccgcattcagcgccgagcacggctgctggatcaagcccgccagcggcgccgacgagcgcgcctggcagaatacggtccgcgactttgacatgagctggcgagcgccggcccacgatctcctctactacgtgcgtccgactcgtgctctctcgtgcgacctggccttctttcgactgacgagacgaacgctgcttccttgtccagttctcggagcgcacgcccggctcgtacgtcgaggaccgtggctcgtcgatcgtctggcgcttcagtaacgccggtgcgcgcgagctcgccggcgaggagacgcccgaccacgcctgggccaagcgtcaggcggccgaggcgcagaaccacgtctcggacgtcctctgcgagcgctacaagctccagatctaccccggtcgggacgccttcctcctctgcccaaggcatgtcacgcggagcgcggccgtcgcagcgatcctccccgccgagccgtcgtttgacgccctgccggcccacctgagcccatcgatcgagccggcctacgactttatcgcgacgctgacgaccgaccagaagtgagttggccccggcctgcgcgtctggtgccggtgcgaacggctgaccctccctcctccgacaggctcattactgccttgaacgctctcaagtccaaggcgtcgatccacacgatcaccgccggcaaccggcactccaccgcccgctgggtctgcgaccgcgaggaggccggcaaggttgccgtcaccctgcgcgacctcgtcaactcggcctccttgaagtaagaggcgctgtctccccgctgtatcaactagcccagcccgttcccgttctctatacagaccaagatgagctcctcgttaaaaaagacctcgcgattcccagaaaaatgtctctttccctttctgcttgagcgttcttgcaatgaaggtgccgtttgactgccgggaggaggacgtgagcgcgcgccgaggaggccagcaaggcgcagggcgaaaagaggctggctcgtcgcttcgtcctccgcccgacctgcacccgtcacccctcagcccgtctcctcctgcagccagtctcggagcagaagtctactactctttgctcggctcggccctccctcagctctccccttccacccactccccgatccgcaaggcgcctcatggccggtgagtgtttgatcctgtcgctcgtcggcttcatccgttgtcgtcgctcacggccgacgccgacggccgacgatacggacctgcccgcctctgatcgccccctccggctccggccgctcccccttctatttctcttccgcagaacacaccgtcgcccgggccatctcggcctgcgcacgatgccggtcgcgcaagtccaaggttcgtcggctttgcctttgcctgaggcaagggagagggcccgccgtccccatctgccggccggcctacgccgtctctcgcgcgacagcccgtcggccggccctcctgccgacaagagcccttaactaatctccttctttgcttcgctcgtcgtcagtgcgacggaaaactgccggcatgtgtgcgttatggctcgtggcctggctcgttaggggagcctgggctgacctttccgtgcggcttccgatgcggctggcaaacagggctcctgcgtcaaggtcggtcattaccttccaggcacgcctctgcaaaaaggtgtcgcttaggcagtgctgactgtgtctcccttctcgcaggccaaggtcgaatgcgtcggcttcgatgccgtctcaaagaagaatgtctcgcgcaggtccgtcttcctctgcctcccttcagcccttcgtcgcgccttccaccgagcgcgcgcgcgcgagggtggcggcgcgtcggctccgtccccttgttcaaggcacagcatcggctgacccgttcgtctctctctcgcccttggcagctacctctacgagctcgagcaggagattgtcacgcttcggcgtgagctcgccgcccgaggcggaggcgagggcccaccgtctatcctgcccggcctgggcgcgccgccgccaccgcagtcggccagttcgccgggccagtactacgcccagccgactcaggaggcaggcggctcctcgagccacatctaccaacagcagggctacaatccagacgatctaccgcagggcgccgtcgtccagtcgccaccctatggtgccttctacccacacccgttgcccgaggtcaaatcggaaggccaggcacagcagccctcgcagcagcatcagcagcagcagcagcagcaacaacagcacgcggcctatcagccgatgatgatcgacccgtcgctccagcagaacggctaccagccccagggctacagccatgcccggcagtcgagcagcaacggcagcatgacccccggcgccgccagcatgggcgaggccagcggcagccagagctcgggcgtccccggccgcgacattggcagtctgcttaacggcgtcggctttgccgggcatgagagcggcgagcagaagtttatgggctcgtcgtctggcagtgcgtccttctctcgctcttgcgtaatcgtcttcgaatcgctcggcgctgaccttcctcgacggacgaacggcagtctcactcgcccggatggtcctctcgagcgtcatgaaaacgggtccggccggggcgacgcacccaaattaccagccgccgccacagacgaccttcacgccctcgtcgccaacgaaccacgccgaggccgaggcgctcgatgcgctcgcccagctcggccagcacccgcaccccgagtttacgacctcgaccacggttgccgcttcgaacggagccggccagagcctcggcccgcgccgcaagtcgtcggcctcggtcaacccttcgcccggggccgatgtcgagaagcgcaagaaggttgaaatcccggcgctcccgccgcgaggcgccattgagcgtctgctcgaggtctacaaccagtacattcagtttcagaaccagacgctccacatgccggtccgtccgatgccatcgatcgtcccttcgcaggtcggtcactgattgcccgtcgcccaccctcgcagagctttctcaagcagttgagccgcgtcctcgacgagcccgacgaggcgacagaggaagatctcttctttgtcctcatgttccttggtgcgtgccttgcgggcgtcgtcgtcgtcaatctttgaaggccgccgactgacccaggacgaccgctgactttgcagctctgagcacgatggccctctcccggacgctcgacccgacgagcgacctgcgcatgtcgtccgaggccttccacgctgaggcgatgaagcacatcgactgcatcctcaacagctcgaatcacgttgggctccagggcgtcctgctgtgctgccaggtgggtgactcaagttgactgtcgctcgctcattcccttgcctgacaagaaacccctttgcctcacccccgtggtgctcagtatgcgctcttcaacccgggccggggcagcatctggtacctgaccggcatggccatgcgccagtgcatcgagtacggctaccatcacgaggtccttcagcactcgatgaacgccagcccgctcgagattgacatgaagcgccggctcttctggacgacgtacaaggtgcgtctcagtccttcctccttcagcgggtctttcgatcgtgtctgaccgttcttccgcccatcgtagctcgaccgccagctctgcttcaatctcggccggccaccgatgatcagcgacgagttcatcaacacgccgtacccctcgctgctcgacgactcgctcatcaccgagacctcgctcggcccgggcgagccctttgccggcaagatggtctcacggtacgtctgactccagtcgcacgcctgccgtcgagcgactgctgactgagaagtccaccccctctcatcaaccatgcccgctcaggcatgtcatcgtcatccgtcagatccagtccgacatccagcgccggctgcatcgcgtcagccccggcgacaagcgcgaccttcagggcatgcctgagcaggcctggtttgataacatgtgcgctgaattttgacacccccggcgctatggagcccgaactgacccttgtctctctctctctttcggcaggctcgaaaagctcaaggactggctcgcgagcgtgcccggggccgagtcaagctttacgagcgccgagatgtgggccgtcatgttccacaacagcgtcctgctgctattccggccgtcgccggcctgcccgcggccgacccgggcggccctctcggcctgcctgcgctcctccagctacctgatccgcatcgtccggcgcatgtaccaagccaacaagatgaactacctctggctcggcgcccacacgctctttatggccggcatcacctacctctacagtctctggaacgtcgcgctcggcaatattgacgacccgccctcgctgaccgagagcatgatggacatccagtcgtgctcgtctgtcctccaggcgctgtcgtgtgcgtccctccgtcctgccgccttgcccgtctccgtgctaacctctcccccccgggccccgcttcagtcaacgtctcatcgtcggccgcctgccgcgaaacgtttgaagtcttgtcgacggccgtcctccgccggctgacggacgagtcggtccagggcgggctcggccaacataccgtcggcgagggcaacgctgctgtcgacaatgacggcgacggcgacaacccgatgctcggcgagaacctcgattcgcagcccggcgcgccctcgccgtttggcgggctcagccagtcggttcagcaagaggccatagaccatgcgacgccggccgcgccgctgccatccgacctccaggggctcgacgacctctttctctacccgctcggctcgacgatgctcggggagacgcatccaacgggcgacccgttcggcctaggccccgccggcggagactcggccggacgcttcgaccacggcctgttcgaatcgctcatcaactcgccgagggtcggctcgccgtcgcgcaacccttaagggctgccctccagacccgccccttgtcatcgtccttctccatcgcccgcgcccatctcgctacgtaaaaggcccggccccgttcgcttttcctccgcacatgccccgcccgccctccactcgaccattcgctcgcccgccttcgtccgctgcctatgatgacccgtcacgctccagagacgagagatgcattgtcgatctagcgagagggtggctttgacacccaggcggggccggccgaggcgagaacacggcggggggggattggaagatcagagaaagagaaggaaagggattgaggggcaatgcaaagggatgaagccagcccgccgtttagcgcgagggctgtggcggctggtggtagctcggcggcaggttgaagagggcaggcacccggcccgggggcgagagcaggctgccgccgagggcagacgactgctgctgctgctgctgctttgccccgaaggagccaaagggatcgggccggccgccgccagactggagcgagctgctcccgtaggacgggatcgtcggcgtcccccaggtcgcattgctgttgatgttgacgccgttgagggacggaggtggcggaggggccgacgaccagatgcccgagatggtgccgggcgcgagtgcggccgatgccgccgtcggctggggcgacgttccaaagggcgacgaaccgcttccgccgccgagggcgttggacccgggcggcgagggcgcgccccaaggcgatgctgcggagagaccgccgctgctgttgccgactgagctccctggcgctgggccgccccagatcggagcggcgacgtgctgtgacggccgccgggggacaatctcgtcgtccgggctaagcgccgacgagccaaagacattgtcgggcgacggcgagcgctgactgctgagggtcgcgctcgacgccgacgggattgaaggcagctcgtcgagaacgtcgagcccgccgtgctggtcgacgctcggccggccgatcggccctgggcgctggatcgcccggaagtcgctgcccatcgaagaagggccggagaacgagttgggcccggtcgggagcgagccgaccgacgggccggcaccggccgagtcggcgttctgcgacggctgtcggctgtggctggccatcgacatcggccccgacgcataggggtcgtgcgacgacgccatcgccatccgactcggctggctcgggaagcccatgccgatcggtgccgtcgcagctgacgagtgcggtgggggcgacgatcgcgaaggcgaaggggccgacgaggtcgcctgccggaggattccaggcgaggccggcgcctgggggtagcctggtggggtagggccacccatgccgtagacgcccgagtagccgccgggtcccatcggtggccgaccgccctggaccatgccttgcggctgctggaaacccatgccgttgaacgccgactgctgctgctgctgctgctgttgctgcgacgggtgaggcggcatgtgccgcgcgtactggaccggcggcatgcccatctggtgcgggccagggatcggcggaagcgagtttgacatgctcgagttggaccgtgagctcgggccgggcgacggcatcggaggctgctggtggtggtggtgctgctgctgccggccagacgagctcttggacgtcgacgagccgggtgccgaagccttgcgaggcgaggatgtccgctgctgctgcggagggatggcggcagctgttgcagccttctgagcgcgaagctgagcggcggccgcggccttgacgacggcagccttctcggcgtcggccttcttctggatggcggctttctcggcgagctccttctcgcgagcctcgcgagccccgcgctccttgcgagcgacctcttgccgggcctcctcctccttcgccttgcgctcgcgttcctcgacctgtcgccgggcggcctcggcgcggtcgcgctcctccttctccttgcgctccttctcgcgggcttcgcgttcggcgcgggccttctcctccctgggaagttgcaaggatgggtcagtcagtctgtagcaagctcagtcacaggcggcgtgcggagggcaacccacttctccttctttttgcgggcgagctcgagttcgcgctcgcgctcttcggcctggcgcttgcgcttctcttcctccttgcgtgcgacctcgtcggcgcgggctttgcgctcggcctcgcgcttgacgcgctcctcttcgcgccgtttcgcacgctcctcctcctgggccgcctgcctggccttggcggcctcggcctcggccttgatagaggcctccttgcgggccttctcctcgtccttggcgagcttttgcagcctgtgaagcaaagaagacagcgtaagtgactgtgagcgttgtgagatcgcagagcgtgagcgcggagagacaaaccggcgcttctccttcttgcggaggttctcctgggccttcttctcctcgcgcgccttggccgcgccctcttcgtcctcgagctcgcgcaggagctggagctgccgctcctgggcgactttctcgcggtaggcctggaggacacgctgctcgaacatccgggcggcaaagatctggaacatgcggcgaccctcctccatcttctgctgggcagaacagccggagtcagcgtgcgaatttgtcgaggaagaggcaagggcaacgaacttcatcctggtcgtcgtcatcctcctcgtcctcgtcctcgtcctcgtcctcatcgtcctcgtcgtcctcgtcatcctcgtcgtcgagctcgctgtcgtcgtcctccacgctgcgggcagcctcctcctcgcgctggaggcgccgctcggcgagctgctccatcatctcaaggaacttttggccatcgttcttgagcaggtcgtcggcgacagtgaggatgcctacgagcgagcaaagcggcgaggtcagtcaagggaaggggtcgacacaaactttgaagagtgaaagacgcacccttgacggtcgtcaacgggccgccgaaacggaagaagtcaccggcctcgccgtcgggtgctggcggccggaccggtgcgagcgcgggcttggcgacaggccggggacgggggtcctcctcctcctgctcgtcaatctcctcgtcgtcctgcggcaaacgagaagtcagcggggcacgccgtgcgaagaagtgaagccgaagggaccgacctcctcatcctcgtcgacctcctcgtcagagtactcttcctcttcgtcctcttcgtcctcctcgtcctcctcgtcctcgtcatcgtggtgatggtggtcgtggtggtcgtggtggtggacgtcgtggccgtggtcgtggtgaaagtgctcctggatcggcggcggcggcctgtgctcgggcgcgaggtggtcgggcttgatgaggacgccgttccggtcgagctcgaccgagccggggaacgggccggggccagcgggcgcaggcaggctcccgcccgaggctgcatactgctgctggtagtgcgcatagtgggcgagctcgtcgtagtaggcctcgtagaggacgtcgagctcctcctcgatcgccgtccgcttgcgaccgcaaacggcgcagccgcaggagtgcttctgctgctccttcatcttgcgcaggacgacgtccttctcaacccggacgagcgaccgccgctcgtgctcctggagcgcgagccaaaagtcgcggatccgctcacgctcctcagaagtgttggtgttccagatcttggccggcggcactggcttggctggcgtcgtcgccgccactttccccccgaccgcaggcttcgctcccgctgccgtcggatggggtgccccagcatgcggatgcggatgcgcctgcgtcaggggcgggcctgttgacggcgccttgcctgccgcccgagccgaccgaggatgggcaaccggcgggtaggcggccgggttcggcgcaaccggctgttgagccgggtgggggtgcggcgggtggggttgctgcgtcgccggtgggtaggccatcggccgcttgccctcggcccgggccgacgccggaggcatcgtcgcagggtgcatcggctgctgaggcgggtgctgcggtagctggcgctgctgctgctgctgctgctgctgctgctgctgctgctgttgctgctgctgctggagaagctgctgctgttgatactgctgctgctgtaggagctgctgttgctgttgctgttgctgcttctgctggtgcgtcggcggcgccggcggtgggtaagacggcagcggtgccgggggcggcagcgagggcgccagcggcgtcgtgttgccgcccgagcccttcttcttcttcttgttcttcttctttttaccgccgggctcgccgttaccgtttgggaggccagcctgggcctgctcgtagtgatcgtcctccgagtagggctcgtcgtcaaagtcctcggcgctgggagcgagcgggcaggacaacgtcagcaatacgccaagcagctaaggggggtaccgttgggcctcacctgtcgtactcgtcctggtcgcggtcgtcgagcatgatgacgccgccgacgggcgggcccggcatgtagttcggctggcgcggcatctggcctggcgcgagcggacggccggggatctgcgcccggagatcatagtcggggtgcggctggaaggcgaagtcgagcgcggccgggtcaaacggcggcatgccgttagcctggcccatgacgccctttgcgttggcatgggcggcgctgacaatctgctgggccatcgccagcatcgtattgctgtttggctgcggcaatggcgagaccgaccggtggtggtcgccggcgccgttcggcgcccggggaacagcctggggcgggctcccgaaggcgcccgagggcgcgatggggagcgcgttgcggataaagttgcgcaggtgggacgggagcgaggtccagtactcctcggtctcgccaaacgtcgggtcctccatccgccggtagagctcggtcgccgtgttgacgaggtcggcgtgggccgacggcgacaggcccgacgccgggtagtcgagcccgttgagcatcccaccaaacgcggcgcccatcgcgccgttcatcgctgcggccgccgccgccgccgcgttggcgccggcgccgtagcccgatgcgggcgggtacgggaagtcgttcgtgaaggtgatgcccggcgcgttctcgagcgccggcaggtcttcgtcgtcctcgtagtggtagccgtccgagtcgtagccgtcgccgccgtctgccgagatgacgttgggctgctggccggccgccgccgccgccgccgccttcttggccttcttcttcttgttcttcttggcgttggccgagggcggcggctgctgcgtcgcagacgggacggcggcggcggacggggcgacgggctgggcaggggtctggcgaggtatcgtcttgttggccatgaaaggaagcgggtgatgcgagaagggccggctagaggaagggcgggccaaagttcttgcggactggagctcgaccagacgagcaagggtgcaagtgtttgaggagaggtgaaagaaaggtcaagaggaagacgagttgaggacgagcaggtcggggcgacgggacgaccaggtgtgcgtgaaaagagatcggaagcgacgaggtcagtttgagctcgccacgaaagggaggtcgatgcgtgaatagggccaagagggagctggccgagctgagcgccgtcctgctgctgtcagaccagccggtcaggagggcaggaggccggaggtcgaccaggacctcgcgaggtcgaccctccgaggacgggctctgcctgctccctgctcgtgctccctcccttctcggtccgccagacgctgccagacgcacctctgggacgaccttgatcgagctggttccttgacgggcggattcgggtgcttccagtgggagtttgcgacgtttgaaggtcaagagcgctgggttcaaacgggaggtgtgggtgggccagggcagggaggaggaggaggggacggccggccggcagctctggcgctggctggccgagagctgcagcagcacgacttgcagatgcgatctcgccgccgccgccgggcagcttccccctcgcccgcgcgcgcgccgcgcagagaggctgacagcgttcacttcgttgtgagattcatctccatgctcagtcaacgcaaagacaaggtgggcagggcgaggttatgcatgtcatcaagaaggtcgaagagcgaacttggagcgaccagtacggcgtcggagaggacatcagcgcgaccggagccgacgccgtgccatcaccagccagagggcggccggcgtgttgcccgtcgaggtgcgaccactcaggagaccatccagccagtcggccttgacgctcggctggacgctaggcaggagcgagcgcgccagacgcatcggcagcgaacgagcggcccgattgcgtgcgcgatatgcgcctcttgttcgcggccgtcctgagggcgctggatctactgacgggcagcttgaagagaacggccgccgttcgccgttgacgccaccgagctgacacgtcgtgaaggaccagagtgcgttcagcgacagtcggtcgtctgtatcacgccgcgcgcagacagtcagaacgacgctgctgagcctcgtccgagggtgggccttctgcagccctcccatcatcgagcataccgccagtcctgggtgcgctcgttctgagggcgtctctgcaacgtgcgtctgagatggcagcctgcgagggtgagcgggacgcctgcagacgggctcgccgagttgcgcagcgcagcagcctggccaacaggcagccggcgagagcggcgttccgaccatcggccgctctagagggtgcaagaactgcacgactggagtcagcaggtcctgagctcgctagccaggccgtcttgcgcgtcaggagaggtcctggtcggtcagcggacgacctggcatggagcgccctgcggccgagccctcggtcaggagtcgtctcggcctccctgggcgagcgcagccaggtcgatcgacgaggagccgcagggcagttcagccgggaggtccttcttgccaatcctactgcgggtccatacccgtctgaggcgtcggtggcgaggtcgacggcaaaaggaggggagcgagcttcgagtcgaggtcaagtctcttgcgggcgcgcgggcgcgggcgctggccgctgacgcggggctgggtgtgacttttcagactccgccgcgcgcccgcgcgcccgcaagagacttgacctcgacgggcggacgagcggccagagattggagtgaggaacaaggcggaggaggagagcgcgcgctggaaggaaacccccgcgccaagggggctcaacgctttgtcggaagcggcggcggcggcatcccgccaaactcctcgacctcggccgccggctggccgccgccaggcgtcgtcctgctcgccaccgtcgccgccggcgccggcgcggtgcttttcctgctggcccggctccggaagctccaggccgagggcgaggccgaccgctcgggctcgtcgacggctgctgctgctgcggcggaagtgtgcgtcagggccgagggcgtcggcgtcgtcgaccgaccgccgcctccggttctcgagtggccggtcgacgagcgcgtatgggttgacgagtgccgggtgcgcgagtcgtgcgaccgcgacgggagggatgacgtcgaccgctgctggggatgcgtgtagtgctggtggcgctggcgaccggcgagagctgtgacagtcggcgctatcgtcagctagagttgcagagggacgtgtcaaatgagcaagtaaaggaacgcactgctcaggtcgtgcgcgccatcgcagcacgctcggacattctcgagcccctcgtagccgtccgcgccgtcctcgtcgccgtcgtcggcgccaatgtgctcaaactcgtcgacatcgacgtcgtcgtcgtcgtcctcgacccgaccctccatctggccggccgcacgctcgccgagccgcttctcggcgctccgcagccggtcctgctcgagctggacgagaaagtcctgggcgggtgtgcccgcccgcttgcccatcgagccgccaaaggcagcgctcagggccgacgacgatttcttcgcgcggggcgtgagcgagaaggggagcgaggcggccgagaaggccgaccgggagctcttgctccggagcgaggtcggcgacggctgcgagccgagctcggtcggcccgcgctgatggggctgctgctgccggggcgtgctcgtgtcgaacggaccggcccgcgaggggccagccacagacgtgttctggggcgccgccggtcgggccagcaggtattgaagagcctgcgagggggggatgggcctcaagcgtcagcgagcgcccgacaagtcgcaaagggcgccaggacgcacccggaaccagaggtcgtgccgctctttgttggcggcggtaaacttcatctcgcgctgcggcgtcgtgacaatgacgctctcgtagtggaggccggccggcaccgggttcggatcctcgaccgagcggacactctcgatataggctgagccgaggagggacgagacgtcagcgcgcgcgcgccgagagaaaacagcatcagccgggacgtaccgctccgagagctcatctcggccccgctcccacgcgcgccagggtcggcctgcccccagtaaagtgttttggtgtaggggtggatccagaagaagcgccggtggcgccggtccgagtggcccttgccgagcttggcgcgcgtgtacttgtggaggtagtcgccaatcatcgtctgcgtgatcgcaaagataatctcggggtcggtcgacggcgtcatggccgtcgccggccggtcgccgctcggcccaggcaggccgtggtcgtggtcgctcgaatcgattgatgagagcgagggctcccgcgtccgaggcgcgctgctcgtcgacgagggaccggcagcggcagcggtcgggtgcgggttgatgacaaagtcggcccgcttcttgacggctgagcgggcggcgagcgagctcgaggacgcgccaaactcggagagcgagcgcgtcgtcggtccgaccgtgttgtactgccggccgccgatgacgctcccgccgacgttgaccgagcccgggggcaggctcgacccaggcgcgcggccgctgctcgagccgggcaggagcaggttgagcgaccgcccggtcggcgtcactgaccggttgtagatctcggccggcggcggcgacaagggccgggcgggcggcggcggacccgagatcttcttgatcgggatcccgagcggcggcggcgcactcggcggcggggggacgacaaacgtcggccggtcggacgaggccgagggaggctcgtcctcgttcgagcggtcgccctcgtcgaccgacgaccggcccgactcgtcgagcgctgggacgaccttgcgcggcgaggacgcatagcggtagacgcccatgtccgacagcgaaggcacccgccgcgagccgtctgcgattatctggatgccagagggagcagcggcactgtcgagcgccgaggggtcggcggccggccggtcgacgtagacgatcttctcgacctcgaccatccggtcgacgggcacctcgattcgcttctcgacctcgacaatcttctcgaccgtgacgatccgctcgaccgggacctcgaccgtccggacgacctcgaccagcttctcgacctcgacgacgcgatccacagggacctcgatccgcttctcgatctcgacgatacgctcgaccgtgacgatgcgttcgacggggacctcgacgcgcgtctcgacgatccggtcgaccgggacctcaacgaatttctcgacgattcgttcgaccgggacctcgacgatccgttcgacctcgacaatccggtcgacaaccttctcgacctcgcggtcgacgatccggtccactgggacctcgacgatccgctcgacgatccgctcgacctcgacaatcttctcgacgacgcgctcgacaggaacctcgacgatccgttcgacgagcttctcgacctcgacaacccggtcgacaggaacctcgacgacgcgctcgacaaccttctcgacctccacgatgcggtcgaccgggaattcgacacgccgttcgacctcgacaatcttctcgacctcgaccaggcggtcgacggggacgttgacaggcttctcgacctcgacgatcttttcgaccgtgacgatgcggtcaacagggacctcgacaaccttctcgaccgtgacaatcttctcgacctcgacaatgcgctcgacgggcacctcgaccacgcggtcaacaatcttttcgacctcgacgacccggtcgacgatcttttcgacctcgcgatcgacgatccgctcgacgggtacctcgacaatcttgtcgaccgtgacgatccgctcgacgatgcgctcgacctcgaccggcacctcgacgcgcttctcgacctcgacttcgacgactcggtcgacgatcctctcgacctcgacaatcttttcgacgatccggtcgacgggcacctccacccgcttctcgacttcgacgacgcgctcgacctcgacgatccgatcgacgggaatctcgatccgcttctcaacctcgacaatcttctcgacggtgacgaggcggtcgaccgggacctcgatccgtttctcgacttcgacgagcttttcgacctcgacgattcggtcgaccggcacttcgacacgcttctcgacctcgacgatgcggtcgacgttgacgatccgctcgacctcgaccgggacctcgacgatccgttcgacaatgcgttcgacaatcttttcgacctcgacgatcttctcgactggaacctcgacgcgccgttcgacctcgacgatgcgctcgacaggcacctcgaccgtcttttcgacgatacggtcgacaaccttctcgacgatccgatcgaccggtacctcgatgatcttctcgacctcgacgactcggtcgacgacccgatcgacaggtacctcccggtcgacgacgcggtcaacgatgacctcgcggtcgacgatccggtcgacagggacttcgacaatccgttcgacctcgacaatcttttcgacgatgcggtcgacagggatctcaacgattcggtcgacgagcttctcgacctcgacaatcttgtcgacgactcggtcgaccggaacttcgacccgtttctcgacctcgacaatccgttcgaccggaacttcgacgatcttctcaacgggaacctcgacgatgcgctcgacaaccttctcgacctcgacaatgcggtcgaagggcacctcgactagcttctcgacctcgacgatgcgctcgacgacgcgctcgatgggctctgacgcggcgaccgcccgtgcgcgaagagcgttgccggtcgccgacggcctcttgccgaggaagttagaggccttaatgctgccgtccgagtggccgtcgctcgagtcgtcagccatcgaatgaaagtccgtgttggagccagacgtgctcatgccgctgccgttgaacatatcgtccgcgagtgcgctcggcagcgcgcggagggtcgtccgcgagccgagcggcgtctgggtcagcgtcggccggcggtcgttggcgatgaaggtgccgttgccggcgtcgtcggacgaatggccgccgtcggtggtgtcgccggccatcgagtggaactcggtctcggtttcggtatcgtcggccatcgaatggaactcttcggccccagactcggccgtcgagtagctcgggtcgagctcgtcagagggcgaaggcgacggcggggccatcaacattgcctcggccagcgacggctttgaccggttggcaccgcgcacgagcccggcgccgccacggccgccgcgaccccctctccgaccacgcgagcctcgcggtgcggttggcgtcgagaccgggcgggggatgagctcgtcctgccaggcagagtcgtccttctcgccagcgcggagacggccgacttcggcttgcgcagcctcgagctgagcgcgcaggtccgagacctcgagattgtgcgactgttcaagcgtctccttggagggcgagttggaggtagaaggagcagtctccccaaacggccgactcggcgaggcgtttggcgagtcgccaaagtcgctggagcgagggagcgaaggatcagcatcgcgcgcagggtcgcacgaatcgcaagcaggccgaggttgcacctgtaactcggcgacaagaggaggttgccggcagcatcgaagcccgggccgcggcgacgagtgctgccgccgccggcgccaccgacgccgaactcatcgacctcgccatcctcgctgtcctcgttgctgacgtcgcgccacttgcgcgtcggcgtctcgttcgcgttcatgctgaaccggcctcctcggccgcccttgcggggcgtacccgagctgggcgagccaccgctgccggcagcgcgcgccgccagcttctgggccttctcgacgagcgcctgaaggtccgacttgtcgcgctggaggccggccgtctgcttgcgcatcgttgcgagatcggtctcatgcttcgtcttgatgtcagcgagggctgtcgtcagccggagtgactcgttcttgtgcgcatctgacgaggccgtgagctcggcgtggctcttagtgaggcgcttaagctcggcatcggccttgttggccgtcgcctggacgtcgctgagctgcgtcttgatgtcctggatcgaaacctcgagattccagttctcctcacgaaacttgtctggcaagagggcaagggagatctgtcaatcgctgactctttccaaggctgcaccaagcgcatcgactgaccgttgctcccctcgagctcgcggacgacctcgcgcatgctctcgtcgccgcggctggcctcgtcgacctctcgccggagcccttcaatcacggtatcgcgctcgccgagcaaggcctggagacggcggacttcgacgaggagcgactggccgatctcggtcgcaaactcgatgtcgttcgaccggtgcgcgttgttgcgcgagcggcgcgagagtgacgaggccgagaccgagggtgccatgccgcccgctgcggccgagggtgacgacgggtcgaggtagtcggatgtcgcgatggcagaggcgaggttacgcgacgagttgaacgtcccgggacggccagcattcaggtcagacgcgaccgacgggctggccgagacccccgtgctggctgcttgcccgcccgaggccggcccgccgttccagacgccggcgttgtcacgttgccagccggcaacggcctcgccgaggtcaagcagtcgattgcgcgtgtcctcgccgagctcgtcgtcgctgtcgtcgccgccgtcgccgcgggcttcgatcgacgagagctcgcgtacgcgggcctcgagctcggcctgctggccaagaatctgttggccaagctggcctgcccggataagctcagactgcttcgcctggatgagcgattcaagctgggaaggggcggttgacaggtcaggctctgaacaggggctcggaggagtcggcggcctcatcagacgcacctggagccgcatggcagccgcaccacctggcttgacgtccttccgtccgcgctctccgccggcatcatccctgccggagccggcaccgttcgtgatccggccctcgcccgtgccctcccacttgccgctgctcgcgagactccagtcggacggcgcggctgacatcgagcccgaggcgagctcgtgcccctggggcttgccaaagagcgccggcggaggcagcggcggccgcgagcgcgacgatgagcgcgacgacggccgcgaggtcgtcagccgtggtggtggtgctgcaaagggatcgtcgtctggcgaagggccatgacgcgacgtcaaacaacacacaggtggtcagcggcgtgtcggtcgaaacttccaaaccaggcgacccagaaagcctcgacgcgatcactcaccgagattcatcgtgtcagtcttctatccttcgagcgccttgccagggagagctgacggaggggaggacaggaacgtcgatggaagcaagctccggacagtcgagctcgtcgacgcgcgtgctgctcctggcggcgggttgatggatccggccgggctgcttcggcgaatgtaggtgttgtctaccgagagcgacgcctgggagagagcaatgcgttgcctgatcagcaggctgcgatgcgatgctagttgattctgagctgggtcggtagagggcagccctggcgaagcagcgcaagggaaaagaaagcaacgagcgggcaggggagagtgcttcgaccagtcctcctcccgaccgacagtccgtcggaaagagacgtacctgcttgaccgtaggtctgctcgagtgcgtcaaaacgagctgaaggagcccaggaagggtcggcaggagacgaagggcggcggcgatggcgatgagggttcggagggcgtcgacaaaggctcgggcgggttggcggacaacgacgacgcgaccaaccgcggcaggtgctgctggcacgaatcgtatcctatgcgcgcaccgacgcccttgcacgagcgctttgcccgaggaaggccatcgcagatcactgatatacgaagctccttcaataccagaagctgcagccccagccgggcccgccctccatgcgcatggcatgccaccagccgacaggcatgacgagcaggtcgcccgcctcgagaacgccttcgagcgcgtccggcagagcctcggcgtagaagcgagggaaacgcgtcggcgatggtggtgtcgcctggaggagcggcaggcgcgacgtgttggacatgagggccgtcgcaccgccctcgtcgctgctggcgtcggcagcgttgtcgtcatcatcggagcagtcagcgccctcgcccgaagcataggggtacatggcggcgtggtgcttcggcgggacgagaaagacgcgcttgcggccgacgacctgggcgtagcagttgtagaacgggtcggtgtgagccgggctgccgcggccggcgtcgccgacccagacgtttgtgaggacgccgctctctgtcgccggcggctgataggtcgcgtccggtgcgataggcggcgaggcatagacgtagtcgggcgtgagaatgtcgcgtgcgagccctgggaactggaagaagaggtcgtgctgggcgaggtagagtggtggccgctcgggggcggttggagccttggcaagaccttcctcgtcgtccacacgtcggaggaagcccgcacgcgcgaggaactcgtcccacgggagtagggcttgaccccagcctgcatcggtgtagccgccccctcccccgcagccttctccgtcctgctgggcggcgtcgatctcgacaggcacgacgcgcccgcggccgccagcacgaagaaggtagtggccgtccttccatctcctgctggggtcgacgagcgcaggccagccggcctcgacgagatggccgggcaggatgaacggctggtcgagccaaagcttgaggtaggccgacagcgacggcgccgtcgccagccgcggtatctcgttcggcgcgaggggcgacgctggcggtccatcatgacgagccctttttgctcgtcgcggtgaggatgtggcttcagtcttgggccctggcgctggaggagtgcgtggcaggtgcgtctcctggacgtgctcgatcagggcaagaaccaggtcaacccgcccgggagcaccggcaatgatgagcacccggtcaagccggccgactgacgtctcccagttgacctcggaccggccctctggcgtcagggcgtcgacgagcgaccagagaaggccgatctccgagtagaagcgccgggccgacgtcggcacagtcgcgtagggctgggccgagatgcggtcgtgcgcgagctgcaggagggctgcaaagcgatgccggaggagggccgagggctcaccgaatagcaaggacctgtactgagccagcgcggacggcgacaagggaccgagtgctgccgggcaggtaatcctcgtcagctcgagggagggcgtggtcgggcgggtgccccggcagcagaggaggctcaccaggcttggtcctctgaggccagtccgctcgaagcagctcgaggagctcaagcgggagactcagggccgtttccatatcgatcgaagcttcagggctgatggcagtctcctggagaggtctggaaggcggtcgatgtcgagagccagaagggctactgcggcgccgtcgcgtcctttcgccctccattcgcgtaccctgccgggctctccttcactcttgccaacgacctcctcctctagtcttctgtcctagatttgctctccgcgtcgacggctcggcattgctctactcgctccgacccagtccagctcttgccactgccagctctccgcctcgcccaactctcagaccgtcctcgccctcgatggccctgccgccgtcgctcctgccagccgagctcgagttcatctcggaggagacgctcgttcatgtcgtcccgctcttttcaatggacccgatccggctgctctcagtgagtgctcctccggcccttgctgacgttgagggagctctcgctgacctcgactcgacactgctcgggtagggcatctacgggccgttccggccgccgaagcgggtcgaggtcccgctctggatggccgtcaacctcaagggcaagcgcaagtgccacatcatccccccgccatggctgtcgataggtccgtcctggtcgctggccccgagttgaagccgcgacgcgacgatagtatccgagactaacctctgagcttgcctctgacgacccgcccgcccgccttgaagacggcttgacggaactgctcgagaccgagcaaaacctgccgacatcgtttgcgccgctcccttcacgacgcttcctagagatctccaaggtcctcctcgacgcgtacgttcctggcgtcgtcggccctgtgctcctctcgaccaggcgcactgacacgcgcgaccgaccgactcttcgcgcagcgcatccgacaatctcgtcaacccttctggcctccgctcgctcattaaagacttgcgagaatgccggctcgccaagcttcgaagcggaatcgtccctcagattggaaagagcgagaccggcctgaacggagagtatctctatgtgcgttctcgcgcctcgctcagccagggttgccccctcttcgaccagcgattctcctgctgatctctttcatctacaaccaccggcagctgacgaacctgactccgctcgagattcacgagctccggccgttctttgtccgagcaatgggcgtcatcgccaagctcgcgccgccgccgccagacgacgacgccccggccggccagggccgggcagacgacagcgacgaggagctcgactgagtcgcttccgacacgctctccctcgaccctgaaggctctcgcctgtccctgctctgtgatggtcactcgatatgtgctgcttgattccggtcgcctgtcggtcgggtccgccgtgcttacaagcgccgacatactacatacttcttgttcgaccgctgtgagtcatgtgcaggacagcgatggcgctgggcagctcgacgacccaagagaagcagacgtgaccgcgttgttcgacgggacggctgcacgcgaaggcgagcgccgcagagacgaggccggcccgcgccgcgcgcggcttccacctctcgacgtccaaggaggtctaccaagctccctctctacccctccgccctcgctcctagatctctcatagatccaggtcgctctcctccttctcctcgaggacacctcccaagaaaaacagccgtcagtcccctcggttgcggaggctccgtcgacgcctcgtccttgtcgcgccctcccgccgacttttttcaccccggtccgccccttgccagacgcccagccctttcgtctgccctcttccggacacgaaaccgctcttctctgcacggacaccgctccccgcagcccttcagtcaagctcctcttcaggtacgccgtcgctgcgttcgaagcgggtcggggcgaggccgatggccgacggcagatcgagccagagggagcaggaggcacgaggcgcgaacagcgggcggccactagcttccaccgaggccggcgtcccgccatgccttccccttgcagcagcagcaggcgcgacgtcgtcgagcacgcctgttctcggccgtccgttgtggcgatgagagccccgtcgcaagcagacagacagctgaccaccgctccgcctcaaacctgcccaccaccccttgtcctcagctcgaccgcctctcacactcccctctcgatctcgggctacttgactgtatcctaacctcccgttctcggccccgatcctcccagagcagagaccctagcgacttctgcttctagttccgttcgagacccccgttcgcttccaatgagtaaaccctcccccgcgccctcatcggcccccgcacctcctccgtccgtctggggcaagccctcgtctgccgcgacgtcgtctgccacgtcgcgctcaacgacgcccaagcccgctggcaccgcccagcagcctaccggcgccgccgctgccgccaacaagaagggcggcctgctcgccaacgggcggccgatcgccgacggcggcgttgtcattggtcggtccgtccagggctcagctcagtcgatcccgatcaagaagcaggccggcggccagggcggtatcgcctttggcaccgtcgaggactcggacgccgtcctgtcgtcgagcccggccaacgcgcccgtcaccggccggcatcttggcggtggcgagggcgtcaagcagtttggcagcgtcgccgcctcggccgtccccaacggccagggtggctttgagaagatgagcgggcccgtccggaccagcagcggtgccttcccgccgacggtcccggccgccgctggtggcaagcctgccgagcaggcggccgccccctctgaggcgcctgccgcggcgccggcaaagaaggaaaagaagaagatcgacgtcaccaagttcttccagggcccgtcggcttcggccccggctcctgccccggcctcgacctcttcgcctgcgccttccaactcgacgcttcctcccccgccgtcggccccggccgcgtcgtcgccgagcccgtctgtcgagcacggccggcggacgtcgtttgacccgtcgcgccctggcccgccccagcagactgtctctggcctgccgccctcgtctggccactcattcgcgccccagcagcccttctacccgcctcacggccaccttcgtcccccgcaccagggcggtgcgccgacgccgcgctcgcccccgagccagcatcagcagccgttcaacccgcagcagcagcagcagcagcagcgggcccagcagccccaacagcaggctgccggtcggcctccggtcaacggcggcccccagggctcgcactcgccccggccgcagcaccagcagatgcctggccagcagcagcagcagcagcagggtccgtactcgggccagccgggcggcatgcccttctacccgggccagggctactacccgcagcagatgtacggcggcggacccgagttctaccagtcgatgccgccgcccaaccagtgggcgccgcctcagggctaccagcagggtatgccccacccgcagcagcaccagcagggccccctcccgccgaaccagatgccgcattcgccccgcaacggctcggccgcgcccctctcgcccgctctctcgcagccgcccccgcctggcacgccccagcaccggccgtcgtcgatttcgcccgcacccgaggcgagcccccggccgccgcacatgcagggcggtcaccagcgcgcaccctcgtccttctcggctgcctcggcgcccttctcgccgagctcagctgccttcacgccctcgagcccggcgctcggcagcccgcgcctgagcgccggttcgaccgcctttacgccccgcgccaagtcggccgcgatcaagttcaccaacgccgacggccaggccgtcgacctcaaggcgctcgccaccgcccggcctgcgtcgagcccggtcccttccgctgctgcccctgcgccggccactcctgccgccgtcgagaagaagcggctgccgcctcacgtctcgacgccggtccggttcgagagccccgaacagaacaagaagcggctcgaggccgaggctgccgagcgtaagcaaaaggagtacgaggccaaggagaacaaggagattgaggagcgcaaggctgccaaggccgagaaggacgtcaaggacaaagtgcgtctgggaccccttctgttttctttcccgcctcgtgctgtttgactgactgacgagcctctgtcgcccaacaggacgaggccgagaagaaggctgtcgaggacgccaaggtcaaggaggaggctgacgccgcgtctaagaaggctgccgacgagtctgctgcaaaggaggccgaggccaaggccgctgccgacaagaaggccgccgaggacaaggaggctgccgacaagcaggtggccgaggccaagaaggcatccgaggcgaaggaggccgaggagaagaagaaggcagacgaggctgctgcttccaagaaggtgcgtaattcgcgttcagcgtgcttgctcgagctagcactgacgcgtccctgccttgctccaggctgccgacgaggccgaggccaagaaggacgccgaggccaaggaggccgagagcaagaaggaggccgagctcgccgtcctgaagtcggccccggctccgatctcgcctgcccctgcttcggccggtctgccccagaagccgacagatgctggccttccgtccaagccggctgccgcgcctgccgccgccgaggaggagaagaaggaggctgccgaggccaagcctgctgccgcctcgaacgaggtccctgctgcggccgccgtcgccgcctcgctcaacgccgccaagtttatcggcgagcccaacgccgtcagctacccggccggcatcacggccccgaaggccgagctcaacgccgacgcgcccgccggcaagttccgctacgaccgcgagttcctcatgcagttcatggagatctgcaaggagaagcccgagtcgctcccgccgctcgagtcgatcggcctcgaggctgatgccgctagcaacagcggctaccggcgcggcggtagccggcccaactcgcttgccggccagtcacggtcaaacgtgccctcggcccgcaacgcctttacgatgggcgccttcggcagcggcacgtctggcaagacctcggccgagcgctttgccgcctcgtcggcccggccgtcgtccatgtcgcgccagccgagcgccgggcccttcccgtcgggctcgtcgctcccgagcccgtcgatgaagggcagccgcgtccggtccgagcgcggccggaaccggagcgacatgccgtccttccagcagccgtcgatgatgctcatgtcggaggaacctgtcgcgccgctcgtcgagtcggccaaccgctggaacccttcggcccgcaaggcaaccggcatcgacgaaaactcgccggcgatggtcgaccgcaaggtcaaggcactcctcaacaagctgacgatggagaattttgactcgatctcgaagcagatcctgacgtgggccaacaagtccgagtccgagacggacggccagacgctccggcaggtcatccggctcgtctttgagaaggcgaccgacgaggcccactggtcgtcgatgtacgcccggctgtgccggctgatgatggagcagctctcgaccaagattgaggacgagaagattctcgacaacaagggccagcccgtcaccggcggcggcctcttccgcaagtacctcctcaaccgctgccaggaggactttgagcgcggctgggccgcccgagcggcgacgacggcggccgccaagtccaaggaggacgacgacaatgcaatcaagagcgccaacgacaaggccgcggccgaagccgaggaggagggtgccgagcccaagcccaaggaggaggccgccctcatgtcggacgagtactatgccgcccagaaggccaagcgccagggtctcggtctcgtccggctaatcggcgagctcttcaagctcgacatgctcaccgagcgcatcatgcacgtctgcatcaagcagctcctgtcggacgtctcgaaccctgaggaggaggacatcgagtcgctctgccgcctgctctcgaccgtcggcaagcagctcgacacgcccaagtcgcgcggccacatggacatctacatccagcggatgaaggagatgtcggacaacccgaccgtctcgtcgcgcatgaagttcatgatcctcgtcggtcccccttccgcctcagcctcccccgtcttccatcactgacccttaccctttccctcctgccctccaggacgtcatcgagctccgccaccggcggtgggaggagcgcaacgcaaccgacggcgtccagacgctcgccgagatccgcgagaaggtgcgtcgtccggcgagtcgcacctgaggcttctctcactgaccgctccctttcctcctgcctgcaggccgccaaggacgagcagcgtcgtgcgcaggagacgatggctcgctcccagagccatggcatgggcggctcgtcgcgcggcggctcccgccgcggccaggcccggaccgacttcaatcagggcccgcaggaagccggcggctggcagaatgcgcccgtccgcaaccccggaaaggccggcgacctcgccaactttggcaagattgagcgccggacgccctcgggcggccctggctcgttcggtccctcgaccgtcttcggcaagcgtgctgccgccaagacgggcgagacgccgccgctctcgcggaccggctcgacccacaacatgttctcgatgctcagccaggcgggcgacggctcgaccgaacccaacacgtcgtcgccgatggcccgcggtccgagcgccgacgccgccgccgccggcgaggagccgacgcgcaagcggctcgtcctcgccaagcgctcggtccccgtccccaaggagggcgacgagaaggaggacgacgacgaggacgaggacgaacaggacgagaagaagcccgagttggacgacaaggaggtcaagactaagatcgacaacaacattgccgagttcctgaacatccgcgacacggccgaggtcgtcctccagtttaaggagctgccggccaagcacgcggcgacgtttatcgacaagctcgtcagcaaggccgttgacgcgagcaaggccgagctcgagctcatctgcaaggcgctcgccaaggttgcagaggagaaggccgtctcgcatgacgacctgatggctgggtgcgtctcgtctcgacatctctgcccttttgccgctgctttgctgacgatctcctttggccccccattgcagcttcatgccccaggccgagtggctcgaggactctgctgtcgacatcccgcagatctactcgaactttgcccagctgtcggtcgccgccgctctcaccaaggacgacgtcgtcgctctcggcgacaagattgacctcggctcggagccccccaaggcgcccaaggagaagctgatggaggcctttgagaaggcgtccgctgcctaaagtcctctcgccgacctggaaatcctcttgctgtctggtgggtcgtgtccgggccctgccctttgccttctcgccgcggatcgctgaccctgcttcgcccccactatgcagaatcttgcaacgccccccttcacctcgcatctctcgcacacgacctgcctgcatcgtcacgccccgacctccgctctccttcgcttcgcaaccaccaaaaactcgaccagcccgtcgacgccgcctccccgggtccacctcgcccgccctctggctcccctcccattcttagagaggcgcccaggcggccgataatactcttcacgcttcgccctttgctttcacgtttcgcaccttccctttgcctgcctttcttctggctccaacttcttcctatccctcgctcccgtaagggtcaccacatgagccctacatccatctgccgactgcaaacacctgctctggatgtcgcgaggcgcgagggagcagcgatggcaagctaaagcagagacgaccgcgcgccgacgtgcccactcggggaggaggaggacgcgcgagctcgttgtccgcccacagcagctcccgaccttcacctcgccgcacccctctcgcccgctcgtgcgacctcgcttcccctacgttccccccttacttgccgacgtctgccacgcccgcgctcgcgttcccctctcagtcatgtcgacaacaccggccgccgccgccgccccaccggccgaggcagcccctccgaaggcggccgccgcgcctaagacgctcaaggttgacaaaaaggccgagaaggctgcccgccgtgctgcccagaaggtcgccagtggcggaccctcgtcagaggccggcccggtatcggccccggcggcgtcgtcgtcgagcctggccgtgcctgaagttagcgggagcgggtcgaagccgcgacgaccctcgggcaacggcggtgctcgcccgcagctcatccgaggcgctgccccgagtgcgccggctgcctcgcacaagcagcagcagcaggcggtgtcggtggcagctcatcctgcagctccggcaggcccgacgctgcacccgctcgtcgccaacattccggcctccaagcttgggtcgagcacggccgtcgccaacgtccatccggcgattatccggctcggtctccagctcaaggagggctcaatccggggcgccaacgcccgactcattgctggtctaaatggactgaagcaggtgcgctctgtgtgcgctgagccgactgccaagcgcctgctgacgtcggtcgactgcttcgcccgggtaggtcatcctgtcgtaccggacgccgccctcgacgacgctctcgcgcgacctgacggcgcacctgtcgccgcagattgcccatctgacttcggcccggccgatgccgatcggcctcggaaacgccatcaggtggctcaaatatgagatctcaaacgtcaacattgacgaggccgaggccgacgtgcgttccatgccgggctgcctctgtacgcgtggaagtgctcggtcggctcggtcggctgactctgcgccttccctccacagacgaaggagatgctggccgagaagatcgacatgtacatcaaggagcgcgtcacgctcgcggacgaggttatcgtcgcctttggcaaggagaagatcaaggacggctcggtcgtcctgacttacgctcggttcgtccttcagccgggtcctcttcgttgtcggcagccgtcgctgacgccaggtggacctcttgctcctacaggagctccattgtcgagaagctgctaatctctgccttcagcgcaatgaagaaggtcggccagagcttctcggtcatcctgatcgactcgtccccgctgctcgagggccggtcgctgctgtcgtcgctcagctgtcacggcatctcgtgcacgtacggtcttttgccgtcgctgccgtcgctccttgcccggaccgacctcgtcctgctcggaacgaacgccgtcctcggcgacggcgcctgctacagccgagcaggcaccgcgagcgtcgccatgctcgccaagggattgggcaagcccgtcctcgtctgcagcgagacgtacaagtttgttgaaaagattcagctcgacccgctggtcgccaacgagctcggtcagtgtcgctcctctgtcttgcttgcgatgttctgcgggccgctgctgaactctttgtcgctgtcgatcgtcatgcaggcgacgccaactcgctcctccaggtcgcgccgacacacccgctcagcaaactcgccgagaagccgctgccgccggcgatgcaccacgcctgcctcctctatgaccacacgccggcccgctacattgacgcgctctgcaccgagtacggctttgtaccgcccgggggtgctggcgcctttggcgcccgcagcggtggcggagcgatgggcagcagctgaggtggatcccatgctctactcaagcaagtcacgcgctatcttcgctctcgctcagacagtgaaccggttcagaaggggtgacgaagcggatccagaatgtcagcgaacggcaacttccttcggaccagaaccgccgccttgcctccggtctgcttggcccctccgctaaccaggcgagatagcgtgtgagggaagacttccgcatttccggcccgcccttccacccacctttgaaactacgagcggccgctggcgttgcatcagagcccgcggcgcgccactcggcgagcgcaacgacagcggccgagacggccttcgcggaaagaagagcgacgagcgccacgctacgattccctttgatgcctttcttcggccgaaaggtgtcgcctttgatgggcgccagtgtgaagacccgagacaaggcgcggcgatggttcagggtggccggctgggcggctcgccgatgaagggggcatgaaaggggtcgaggcgggaaaaggggcaaggtggcctccgaacgcccacgactctcgacgccacgcccgcggagcccgctcagccggctcttcacctccggcctccaacccccgactcccgatacctccgctcccacggccacaggcctctctccgctgacgacacacacgcgccgacgtgcccgtcttttcttgttgactgattttgcgcccgcccgggctgcgggcaggcccgtcgccgcatccgtcaaaatgcaaggccgtcgtgctcctcgctcaacattgctctctcgtctcccatttccagctcactcattttcacgcccctctttctcgcccaatctcgacgacctctgcctgcagtcaagcccgtcaagatgcacccttcctcccctaccggctcgctctctgccgcgtcacgctccttgtcgtcatcggcttcctcggccgccgacctcgtccgccggccacaacagcaccggctcgtctagccttcttcgccggccttcgcctcttctcagccggtcgccctcgaccttccgcccactcggagacgtctgccggcctacgcgtcccttccgccgccggcctattgcaccttctcgtcaccagccgacctctctccatcgccggtcggtcaatcgacgcgctcgccttcaccgtcgtcgcttggctcatcgtcgccgctctgctcgctccctacgagcatcgaactcaaccaggcaaaagaagacgccgcgcggacccggctcgcgccgctcctcttccctgagccgcgcggcgtccgctcggtcgtcaagggcgtcttcgacggcaacaagcgccggcaaacgtcgatgcggatcgaggacctcgatgactttgagcgcgaggttgcgcagcaaatggttggcgaggtgcgtctcttgggcggctgcgacctgcgctcattgacaaaacggctgaccgatgctcattcaatggatccgacagtatgtggcccggtgcgaattcctcggcttctagtgagcgacgtcctgctcctgccgccctcgtgagtgtcaaccgtctacgtctctcgctagcagcgcagcatctgacgccgtgcaccgacttgcctcagtcttcgcccttttctcttgccacgaccgcttcgcgcaagcttcaggccaatcccctttcatcgcatcacaatggtccatccagtgtgtaaaagcatgccatctacccaacctcgacgatcgtctttgacccacgtcgctcttgcgcgcagcccctcgctctcgtcccctcgcaaccacacagtatcatcgctcgcccgatcaacatcctctctcgctctcatctacgtctctcatccgactctctcgcatcagctcccctcacacgtgttaccttacccactcatacgatcagcatctctcccgtgtaccgcttgatcctgcgttcccttcttctctcgcacctctgtcgatccggtgcgctttgcccgaaccacctcttgatggccactcattcgaagagagtcccccttgtcagcagcagcgtcagtgatgactggcaggaagtttgactcgtcaaccggcctgcgggctggcgtttgtgggttggcaatctgggctgcgtgcgcgcgccgttcctcgcgacgccagtgagcctttctcattgcctctgctacggccaagcgtcaggagatggacgtcagactgtcctgagctttcagaggagtgggttcgactcgaatccgcgacgttggcggccaaggagggctacaacggtgtccgcgcagtcgtcgccctcgaggtcatgctcagggcgtacgagcgtaagaagacagcccgctcgagagagttccctttgcgcccgtatgtcctgtccttgaacgcttacctccttgacccggatgtctgaacgcttacctccttgacccggatgtcttctctttgtgcgctttcttctcttcatgatgcgctttgcacctggtctcgccagccacggtgcacaaccgaccctaaacaagcgtgcaatgctttgggttttttttttgcatttatgtttcactcgatctgggtttgtgcccgccacaccgctgcccccccccccgcgctcccggactccggctctgggctgcaggaccaggaatgccgatgcagtccgcgcgtcaggagtgcatcggcaggcgcacggtcgccagcgcgcgcgcagccgcctgctgccgccgctggctctgcgcgccacgccgcactcgtcgcaactccaacacttattcggctttgactttgacatgctctatcgttcgatagctcttcaccttgtgctcctggccgatcttgatgcgccgtcgggcccgatctcgttggactttccggccggtcatgtgagtgagctcgccgaggttcgtcatcttgtagaccgccgacagctgggcctcgaagcgccgcagggcggcgaggtctgagaaggcgagggtgagatcgtccacatagacacttaccagtgccagcccgtccgccccgttccggtggagggagcgagtagtcgagagccggcagggtcttgtccatcgccgtacattaggtgcgtcctgcctgcttccagccgtagagattgcctgtcaggcgggcaacgtcgtcctttcggcctggcacctcgaatccttttttgctgagcgaaacatatctcctcttccatctcgccgtacaagaaggcagctgtgacgtccatactgtgcagctcgaggtcccaggcggccgagagggcaagcaggatgcgctcgctcgtgcccttgacgaccggtgcgtaggtctcgccgtactcccaaggctgctcggtgaagccctgggccaccagcctcgccttgtacttgtcgattgacccgtccaaattgcgcttgaccttgtaaacccacttcgacccgacaaccttagcgcctggcggacgctcagccagctcaaaggtgcgtgcttcctctagcgaccgcatctccttctccatcgcctccctccagcactctgcgtggggcgatcttatggcctcagcgtaggcccgagtttcggtctccggtggtggaggcggcgcaaacgggaagggcggcgaggcaagcggcacgggcggcagcaacgccatgttagtggccctctgttgggtcagctttcaacagaaccgcggcatatttaaccccccttcgggaacgaaggagtaacagttgcgtccagaggtcattttgggcattggattctgccaaataatagtttacccgactacttgaacctctatcttacccaaccctctgtttaaggggtgcgtatgttttgctgacagttatccgctccttctcgcccagccggtccccgcctcttcggttcttatctcgactggcgttcgcattgcaatgtcctgtcaggcgcacatgcgcttgcttcagcgcttgttaggcggtgaggcgcgcggtccttctggacacctcctggcttaccggcagctagatggctgagagcggctgcggcaagtcataagatgcggtaagccaaaggagggggcggcatccgagtcaacctgtctcacgtgtcgcttaagaccaaggcgatcaacgacgaagcgcgaccggcctgccgctttcgacccttgggacatggcgcgagaggctgtgctcgaagccggcccaagcgcaaaggtgttcaacgctgacttcaagtcggcctacaggcgagtcccgggtcgaccggccgagcagcctggcgttgtactgtagtgggatgacccattcttcaccaatcaatgcttactcttcggttcgcgatcggcacctgccgtctttggcttttgagcgacttctttacagcgatctcgaaccgcctgcacgtcgcaaggactctgcgttgggttggcgacaccaccacctcagcggacgtcgccatcgctggccaagtgaacaagggctcaggtggtcgcgcggcaaacggcaaaaatgaatccctaaccgggagtcgaacccgggcccttcgcgtgagaggcgaatatcatagccgttagacaattaaggagttaatgcatgtggtgaggtgttatcttatatattgtatttagcaaggtattatcggctatattcccgcctgcttagggctgattgagtaccccaggtctttgagactcaggagagttcggtaagtcatggtcaggtatactcaacgaagccgatgccctgcgtgaatgatactcaatcagaatgtgtctggtactctgggttgaaattttgaaggtcagcaagctgttgtgtctaatacggtggccatgccttgagcagtggagtgattcgctcggaagtgatcatctcgatgcatgtagactcgaggtcgaacagcttccaatacccccatttggcagtgcgccagatgattctcaagtgatgtatatttctgcagtcatagctgcgatgcagtcgtgtcgaagtcgttagcggcccggagacggatgagaccatctcggtgctgaaggttgccactgatgttgactccgagtacttgccgtgccatcgtgaatccacaggcggcggaaggcaagggcagtcatcagcaaccagcgaaagctcgaatggaaagcagacgcgccttcaacatcacgagcgcagaatcctctgagttgagcccgtactcgacaacgtggaccttgtcgtccgggatctgcccaagtatgcccatgatccgatcgtgcatgaagagctcgctgtcggccttagcaacaggattgaagatcttgtcgacatcgttgaggttgagtcgaccgcggcgtcgcggagaaaggcgtctcgggttgcgcgctccttgctcgtcagctgctgcctccaaagccggggtgcagactcgagtggcgcgagagcgacccggagaaagaccgggttcgactatgcaatcagctgcttgaggtgcgatgcaggactagaccctcacgatcgttggccgcgtgttgcaaagataccgaacgaggaaggtaaggacccagatgacgttgccgttgtgaacgagagtgttcgcccagagatcgcgcacgggttcgaagagctcaaacgacggccactaggagattgtcttgtgtgttgctccttctcactatgtcatggttcgaccctgtcagctcgggattcgaacccagggcgtcagcccacacggcaaaagagaagtcaagcactaacagttccccacccgtcatcggttcacaacttcctcgtggaaccttcagggggttgaaaatgttgctgcgccggcgccggctgggcgcagcgcgggaacctgggcgcgccgccagcgcctggcgaccgcccagcggccacccgggcgccacgccatagagtccgccgggctcgttcctcctctctcttttcgctccctcctcttagctagacgtccgctcgctccccctcctatacttcagtcgtgcacggagtagtcctgagattgaggcggccctgcctcctgcctcgttcaacagtaaacaactctcaatcgacatgacggggtgtcgatcgacattacaagtcggtcgatggatgtgattgacgtgtcaattagatatcacttgacctgacagtcaattcctcaattgatgggaacatgatcgacgcgccggtcactgagcgctgcgggttgccgccgcacgctcgaactcgcggaatccttagcccttgcgctcgtcgcttgacatccaccacttaccctcgaataatcctaaggtccacctcaatcgaaacctctaccctaacccttaatgcccacaggatccgtggttcagactctccacattcggagtccatgaacggaaattccgcacttgataggcggggtctcagcggaggtgacgtcacgtgcggaagatcactccacagcattgcctttgtcgcctctcgtttctcaacctataagaggcgtccctcttaactctcgcccgactttcttcccctcctacatcattcactaccaagtccctctcatcccctcgcacctctgttcggccttgtctcccctcaatcgactcttcactctgttacttgacctcgtgctaacctctctctctgccctctttgccagagtcgactccacgtcacgggtgcgcctctcgccttcactctaagtgctcctctcccgtgcggatctccagctgactacttacctccccttgaatagctcctgcacaaggttcttgcacagctcctgttcaagggtcatttgccccttagttgatgcctgctccttcttttccgtgctgactcgtctaactctctgcctccactcgccgcctccgcctcgcctcgtctcacagcttcttgccgttcctaagacttctgtagaccctcgattgaaacatgatcttcccttaaatagctgtccttaccaaagcaggatggtcaaacatgaggggtttgatcaagggttagcaactgctatctgatcaagcatttgacggcctgagcggtgcagtttgaacccaaccaagtgcatttaaggtcgcaagagcagtgtttcatacccgacggcccgcggttgagggcatggatcgggtcataccagggactgaagtatatccggggaaaccatcaactggcggcgctcaaacagccacccgcgatgctatcaattgaccccttaatgacctaatgacccctcggttagacatatgtacctgcaggacggttcagggtccgccttccatttgggaaggggtagtcccactttaagtggtcgaccccttacacaaccccctgtaagttttgctgacatgggggcgacgggcgatctgacggagagagaaagccgagaggtatggatcgacacgacagctcaggtgtgctagccgttgaagccgggcttctttcccctggccgcggcacccttgacctctagaatgccagcgctagccttgttgggaccaacaaacacgcgatagtggcgggctcgatcggcccgggcgcggcagacgtacagccgcatgccggagatgctacactgggccttgaccaacgcccccgcctgctggtgcgtgtggagagcggggcgacgacggcgtcatccagggaggagaaggggtaaccagggagatgacgacgcgggttgcatggaggtcaatcagggtgtcagccggcgcgctggggttaagaggaaatggcgtgtcgagctgctgaggttggaggaaaggataggaaggggacaggaaggggacgccggcggtgatgggcggcggaacggaggagctggagagctcatccgagcccgcgcgccgaaaggggagtcacgtcaccttgccgtggagaccaaggaccgccgccgctctcccgatccccctccccccaagtgactgagccgaacaagtagtagaggagcaggtactgcaacctcttgatgtatgctcccttctagtcacaggcttcctgagtcgttggaagggacaccgtcgtcacgccaagactggtagtcgggctgtgcgccagagtgacgcgcgcaggctgcgcgatgctagctcggagagaagtgttgaacgacacggccttgcaggggacaaggcagtcgggtgaacgcttaagatacatgaggacttgcgccttgaaaattgctatgagggaggaagccgtaagggcaagagagtgatgttacggagggaggtaaagcgtgttacgttcgatgaagcgtaaccctaacttccggcgccgccgcgcgggcgggcgctgcagcgcgccggcgctggcgaccctcccgcaaaactaccacgacgctcttccttcaacaagaagaggaggtcggacgaccaccttgccaccctctcttcctcaaccatccatcacctctcgcgccacacctgaagccagtcagccatgacgctcgcccagtccttctactcgtggttccgcatctcgcccaagaaaatgagcaggaagcgccggctgctcatcctccgaacctgtgcgtcccgtcgccttgctccctcctttcaccaccagctgctttgccctcccctgtcagcacctcgcttcctgctgcctgagggctcgggcggagctggctggtcataaatggctggtgccacatgacccggcgctgtgaaggggcagagcatgtctctctttggggacggcggctgtcagccaacacagctctcgtcgtccctctggcgggttggctgagccacgctgggcgagctgaagcctggctcgatctccagtagcgagcaagtcactgacgcttgcctcctgctgcgctaactcctcagatctgcctggtgcgtcgaagcatggcatcacgactgcgcctcggcgagaaggcgactgaccccgtccgccgcctctcttctccgctcgatcttcctcgttgccgatactttggccgcatagactgggtgagtgtcgtcctcctcgagctggatgaggtgcactctccgcgctctggtgctgatcctatcgctcctgcttgtgcctccctcttccgcccctccaccaatcacccctcacccatccgacgcgtctccaggtcatcacgctcgtcctctggggtttgttctacctggtacgtttgccgtgatcagcatatcgtgtcctggacgggcgtctcacgtcttgtccgcccttgtctgtccagctcgaccgtatcaacggcttcaggcggcagttcagcgtcaccgacgcttcgatccagcacacctttgccgaacacgagcggatcaccggcgtccagctgttcctcatctgcctgctcgccccgctcgtcatcattcttctcgtcgccctcttctggaagcgctcgctctgggactggcactctggctggctcggcctcatcctcagcctggccgtcacatcgacggcgaccaacattgttcgtcacgccggggcggtcattgtcgggccgccactgacaactaaccgtcttgatctcgtacctcctcagatcaagatcaccgtcggccgccctcgtcccgacctgcttgtgcgtggcgtccctccccgcccctcctccttctcttcgagccgagcaccctgctaaccacgacctccctccccttgccgccttgcaggaccgctgccagctctcgcccggcacgaccaacgctggtgcgcccggctacggcctgacgacgtggaacgcgtgcacgcgaaccgaccttctgaacgtccgtcctcgtttcgccgcgctcagcctataagcgtagtcctcggctgaccaccgccctcgatctgcaggacggcttccggtccttccccagcggccactcgtcgctcagctggtgcggcatggtctatttgacgctctacctcgctggtacgatgcacgtctacgaccagaagggcctgtcggccaagacctggatcctactcgccccgctctcggccgctgccctgacatgtacgtcttggccgcttccgagcctctgcactcgccctgacgtcctctcgcttgacctgcctacagccatctcgcggtcaatggactaccgccaccacgcctcggacatcattgccggctcgctccttggcatcctcatcggctggtactcgtatcgccagtacgtttggccatgttactgaccgcggctcgactcgcagctgatcagtcgttccctccctagatactacccctcggtcggatcggccctgagccacaagccttacggccctcgggtcccgcgcgaggagcaggtcgaaggcgaggtctcgcgaggccttcggaccgacgaggcaatgaacggtggcagtccgtcgtcggtgctgccgatggtctccagcgtcgtcagcggcggcagcaacggcagcagcaaggcgcagcggaacggcgtcgcctcgagcgaggccgcgcagacggtgccgacagagcatggctacgaggtcggagccggtcgcgtctgagggcacgagggtgtcttctctttaatttatgccgctgtacttgacgacgctaggcgactctcgagcgcatcaccggggctcagagggacgggaacggggagggtcgaggccgacaaccagccgagacgatccgcagccgcccgctccgattcgcctccgacaccatccttctcctcttctctcgtctggtctcacgggatgtacagacgactgccgggatcctcgacaagccacgcctatccctcccaccggcgtcgtgggattgggccaggactcgctgccgttgccggctccctcgtcctgggatgcgtgctcgccgtcgtcctgtcgacgaatgccctcctcctcttcggctcgccggaccggtcatcctcaccgctcttcatcggaggccgatcgccccggctgctttatgactggaccgacccgaacctcgtcgacagccgcgacgagcgtgctttggccagggactgcgagtttgactcgccgctcgaccacctcgacctctggcctgccctccagaatgcgaccgggctccccgctgcctcgcccaacggcctcctgaacgtcaccggctggaccaatcccgagggatggcatccgctgctgcttctcatcaaggagggcgaggagcgcttcaaggcgaagctcgcctcacagagccggaccttggccgaggccgaggccgagtacaggaggcgcaacgggggccgtcggccaccggccggctttgaggtgtggtgcgtcctgatgtgtttgctcgtagtttggcagcagcagcagcagcagcagcagtagcagcaggctaaccatgcgccgaccgcaggtggagctttgcttcgtcgcacggcgttcgtaagtgcaggcttcagccccaccacctctggcccgctgcgcgaggtccatacgagaacaggcttctaaattatacttcccattttaccccagtcttccctgacgagcatgccagtacggagctcttgaggcccttccagttgctcacgccaaccgagcgtcgtcgccgcctcgagctcgcttcgcgcgaagcccgcgatgacgctgtcgaggggtcgccgaagcaggccctcgttcgcgtcatcaacgacgagaaggaggggctcatgtgggcgccgctcaagacgtcgagtggcaggagtggctacgtgccacgcgagacgaggatgaagagccggacaaaggcgcacctggccgtcctgcagccgatccagcacctgctgccgaacttcacgtaagggctgttctctctgctcccgccgtccgcagatgttcaggctgacccgtccttggtcagctttgtgctcaataatgcagaccagccggtcgttcttcttgacccgaaagcggcgggcgaacgggaggattgtgcgttgtcggccttgggaagcttgggattgacgcagcgctaaccccctgttcggctggccgtcagcttccgaactggctggccactcaatcgattggctcgccttctgcgctcgccgaaacgacgccgcgcaccggactggtgcagctcgcggtgacctcggccagagcccacttgtcgctgaccgcgcgctacgggaaggcgtgacgttcgtgcaagacgtcagacggtccagcgacccctgtgccaactcgaacgtcagttgtgttcttcgccagttgctcgagatcgcgttctgacaccttccttccctccctctttttctcctgcagctgctcgaacagcacggtttctaccttcaggacacgggcgggcctaaccctgacctgctgcccctgacccgtgcgtcgtccccggccgcgatgcgtttgaccagcgctgacgctgttcttgcgccgctccgttgccgtctctgcagaccgacagctgctgccgatcatctctctttcctccacgccgcggcactctgaccttctcggcgtcccggtcggaatcgagggctggatcgagcacgtcggaagtcaggacgtcgactgggagcagaagattgaccgggtctactgggtgcgtgcgcgcttgatcaagccgcttcaagcccaatgccgacgccgacacgcacctctctccctatcttctagcgcggctctgcaacgggcatgtacaatcacgtcgaccccgactctgaccggccccggtggctgcagtcgcatcgccctcggctctcgctgtttgccaacgaccagaccaagtcacccgaccccccggtcgagctcgacgtcagcacaggtggcgtccgagcgacgctgacgacctggggcgtcaggtggaagcgctggctcgacgtccatctcgcctcgagcatcttctggcgcatattccccttctggccggagactggccagcagtgcaactggtgggacggcacatgtcgttcgctcgggtgcgccgggtcctcctctttctttctctcgctcgcgcctgcttctaacctctttcacacttgccgcagctggcgctacttctttgtcggcaaagacccctcgggtacgagcgaccgattcaaggttgctctcgacgtcgacggaaacgcctggtctgcgcgcttccctcggctgatggcgagcaagtcgctcgtcatcaagtcgactgcttttaccgagtggaatgccaagacctttccgtcgtggtacggctacctccctagccagaacgactacggcgacctcgaatcgattctctccttgtgcgtgtgccccaagtcggtgctgtccccggcgcgctccgggctgactccctacccgcccgccgcagcttccacgagcctgggatggacgaggtcgcgcgacgaatggcgctcgtcgggcgctgctacaagtcgcgtgccttccgcgtcgttgacatgcaggtcggtcggcctgctgctatcgctgtttcctgtccggaagctgatgactcgcccgcttgactctccaggcatacctcctcaggctctatatcgagatggccgacctattcgccgaggaggagccctgaccgaggcgtgtatgatgcccagactttcgcgacgcaggacagacagacagcatcggaaaaggtcataaggagtacaacgggaaagagttacaggtcagggatctacacatcggctcgcggctcgcgcttgggtctgccgaactgtgaggaaaggagggagtcagcgagtgagcggacggcgcgaggagaagggatgcgagcaaccgcaccgcagccttggcctcggcacaccggccgccaccgttgtcctcgtcgatggcaaagcagacaaagagcgcgtcggcactggcgcaagtcgagcgaaggtcagcatgtaggcctgaagctggtcgcccgagcaggagggatgacgcacgcatcaccaagtgcatcgacaccaaagcggaccgtcgaccaaacgccggcgccgcagagcaggccgatgatcggcgcgtggccctcgacgccgagggcgtgaatcgtgaagtagtaggcggccaaggcaccagcagctgagagtgcgagcgacatcagggtgagcagcgtcttgagaagggtgtctgtggtcgacgagacacgcaaagagaagcagtcagtcgttgcagagcgaaagcaactgagaagcaggcgacgaacaatcgaggatcttccgtccggcttcgcggcctcgtcgacgaacgagaccgccgacagcaagcgtgctttccttgtaagatcggcccgagatgccgacgtagatgagaacgtagctgttcatctgttcgagcgcgctgacaacaagcagcgcgagcggatggacggcacccatcggcgagagccacggcggaagggcggccagcgctgatggcgatgtcgcctgcaggtagagtatcgtcagcagcaggccgtttcacttcctgaggtcacacagggcgacgcacccgcttcacagcctcggccccatacttgaggcaaagcaggcagccgctaatggcggcgccgaggcagactgagccaaagctgcggccggtcgcccggtcccaggcgacgcggacgtccgacacgtcgagcccgaggccgaacggatccgggtcggctggccgcgcaggcaggtcgttcctgattgtgtgagagcggagggacgagcgtcaacgacgcaacctcggcatctgactagccaggatgggacgcaccggtggaagtaccactcgccgacgacgccggcaatgacgacccgtcgcacgccgcgcacgatgttccaagcccacacccacagcgcggcgactgcgacgagcagccagatggcgtgagccttcagatggtagtgatacgacgcctgatcactaagggcgcgacaacagggagcgagggttaattctgactgactgcgacgaagtcgtgaaggcagcactcacggcgcttcccaccagccaatgagaaagagccggcaccagacgaggagaaagacgctcgaagcgatgccgaacgcgagcagaagcacgggagagatcagtagcagcggtggatgggccaggaggacgtcgcaagccagctgcgaaagtacgcgcgttagccagcctcaccaacgaagcggcgctcagaggcagatcggcggcgtacctcgacaaccttgacggtccgttcggcgcccgaccgacggaggtaaaggttgcgggcgaagaggactgcgccgatcagcggcgggagggagagaatacgcagcctgggacgcaagaaaggggggggggcgggggaatgaggtgtcagcaagccccatcgcaacgaccgagcgcaatcggtaagagacttaccccgtcgtgccccaccagccctcgccttcgaacgagccgacgagtgcgagccagcctaccgcgccgaggacgagtacgccgaggccggccgctccgagcagcgtgtagcgaacgctccgcctgagcgcccagagcagcaagggcggcgcgagcgaggccgtcgctagcaaaagcgagagcagtggcagtgcatggaggagcgtccggaacggcgtcgggttgccgttggcggcgctgtcggacgtctttgacgacgacgcaaagctgaacgtaaacggcgcaaagatgacgaggccgacgcttgcaaagagaaaggctgcgagcgggccggggtcgtggtacttgcgccagtcgcccctaccgatgacgcgcgagtcggccagcggctgaggagcgcgggccgggacgccagaaggagggcgaaatcgccgtgatcctgagcgggcaccgagcgggaggtgggtcgacgactcggacgacgagagagatgacgacgaagccgagcccgactcggaggcgcccgaggacgaggctgtcgaggacgaaatcgacgacgaatacgacgaggtcgagtcgctccgagcccgccgtccagcgccatgaccggcagaggttcctggcccggtcgagctcgacgccgttgggtaggccgactggtgggcaagccagccccttccagcaccaccaccggctccggacgagacgcggggcgcagcagcagtgggaggctcggggtggccaaacggccttgcctctggctggggcgttcgctcgggcgaggacgaccggacgagcttgaggcgctcgctcgcctctcgatccgcccgtccgacgtaggccgcgctacgcgaaggcccagcgtcgtcgtcgtcgtcgtctccgttggccgagccgaggtcgaagatgacgctcgcgccgcgctcgtcctcggcccgtcggtcagcctcctctggatcggcaaagaggccgtgcgggccgttcaagagcgagtcggtcgaagggaacgtccgcgggagcgagtcggtcgaccggtcctcggcggcagtcggcggcatgggatccgggcgacagttgtggtggtgggccgggtggccgccggtggaggctgatgccgccgccggcctggatgggtgagacgaatagaacagctgcaaagtgtgacaacaggaggtagtcagagacggaccaggaggtcgcagtctccctttggtcacgcaccggctcatcgtcgtcctcgtcgtcgtcgacctgaccggcggccgcaaccggcgtcagcggccgctgatggaacggcccaagaggccgggcgaggaagctgcctgccagagcggcgagggcagccgtcgacgaggtcggtgcagatgtatctgctggtgataaatgtggatctgtcatggacttagagaggagggtgtggctgttgggtcggacgaggcgagactgctgcagctgccggtcgatgggcgagggcgggcagccggccggggcaaggagacgacggcagccctcctgcagccatctctccttccacaccatctcatcaacctcagctcgccctgcccatgtcgagcatagaagcccagctgccatcggtcgaggtcgtcctcaacccttcctcgggcgctcgtctggcaccggccttcttcgagcggacgctcgagcccctactgcgctcgctggaggcgcccttccggctctggacgaccgagcacgagggcgatggcgagcgggtcggccgtgagctcgccgccaagattagggccgagggaaaggctggcgcggtcgtcttcgtgctcggcggcgacggcagctcgtacgagctcatcaacggcgtcttcgccccgccagcctcgacttcctcgttgccgccgccgccgccgccgccattcgtcctcgacctcgtgccgctgcccctcgggacggctaatgcgctctacagccacctccatcaccggccagctggtcaggatgcggaggatgggccggatggagagtcatcggggtcatcaagcaagcggcgaaggtcgtctgcctggtggcggcggcacttgccgaagggcacgacaaccgaggacgaagcaaggctggcctcggtcggagcctggctagacgtccaaggacggcctgacggccaaaggcatcgtcgtgcgcgactgcctttgagccggacaaccttccacccggccctgacgacggaaggcaccgttggcgccggtcgccacgcgcagtcgacatctcccccctctttgccccggccaaccatctcgcacattgtcctctcgctcgcgcttcacgccgcactccttcatctctcggaagccctgcgcgagaccgagcccggcattgagcgtttcaagcgcgcagccgagcaggtccttcacgtaaggcacgaagggtcgctgacgttcggcgacgatggcacgacgacgacgcgctggaacccccggcggcgctcgttcgagcccatctcggcagcgacggtcgacggaccgtttgcctacctcttgtcaacgccatttgtcgcgcggctcgaaccgtccttcctggtcgcccctctgctctctgtgctagcgccagccgacgtcggccgctcaatggacgtcctcgtgctccggccagaccgaagcgaggccgtgcgcgccggcggccaggatgcttgggtcgctcgggtcaaggaaatcctcggcggagcctaccagggtgagtcagacggtcgcgcccatcgccaaggtctcgtgctgactgaggcacactttcgtcatctcaggaggaaagcacgtcgaggcgctcctcattgacccggtcgaggctgacgaggggggaccagccgtgctcgagtactatcgcacgcccggcttcactttccagccagcatcgacgctggcgagcgagaccggcctgcctgtcgacgacgagcgccggctgggccggcttgtctgcgccgacggcgccatctttgagtgcccgccgggcggccatgtcgaagtcaacgttctcggcccggctgattccggtagagatggcgtcggcgaggtttgggtctgggtctagaatgcacttgactctggacacgagcatctatcggacctcccttggctagccgactcctcagttgacgggcgtgtttcctcgtcctgtcttcaagaacgcgcggacgttgctgatctgctcagtctcaatctcaacccggatcgtctcgttgatcgcggccacatgcggcaggacggtcaccgccgaattgccgaggagcgcaggatggatcctaggctcgtcctcaaagacgtcgagcgcggcgcggagcaccttgccggcggcgagcgagtctacgagggcctgctcgtcaataatgggaccccgagccgtgttaacgagcaagacgccggtcttcatcttggcgaactccttgagtcataggcgcaaggggaatcaaccacaagaggggtcagccgtcagccgcgcacagcagccgcagaccaaagtgggcgcacgcaccggatgcgagatgaggtgccgcgtctcctctgtcagcgggcacaggatggagatgacgtctgacgttgcaaggagctcgtccatcgacacaaaggtcgcgcccttctcctctggttaagtcgtgccgggacttcgtcaggcctcaatatgagaggaagcgacaggcaaagacgcacccgacggcggtagccgcattcgcttcgtatagatgaccctcatgccaaacatctgcatctgctgcgagacaaagtgtccgatgttgccgaggcctgcgtcgacgccacaggatggttagtcgggagaaagcctgggaaggcgggagaggggggggcggggcttgcgcaccgatgatgcccagctgcgcaggttcataaaggtcagctgggaaggttgtagccaaagagaggggaaggtcaggcgctcactgtgctcttccttgcatcacggatgatatgactgcaggaagatggatgagcggaagagaccgcacaaggtcagcagcaagtcgtcgctcggttggtaacccatgggaagacgacgcactttggccgacgccactggccctcagaagtcgaccggatataggcttccatctgggtcgtcccgcggaggacctggaggatcatcgagctcgtcgagtctgccgttcggataccgacggccgtcgggttgttagcgtacgagacctggttgaaccgcagagtcagcctcagcgtcggcgagtttctgcagcgagcatgaaagggatacgcacgccttttgaggtcagatagtcgatgtcaaccccgtcaaagccggctcctccggaagtgatgaagcgcaggccggcggcgaccaggtcgtctaggagctcctcgtcgagtggatcaagtagaggcagctctgaggccattgcggcggaagcacgcgtcagcgatcgggtgctcgccaattagtgtgttaccggacctgaccttgccttcgcatgaagagcagcgcatcgaagcctcccgtctttctgatggcctcgcgaagccgctgcttgaagagctgcctgtccacctggtcgaggaaggtgacgcaggcgagcgcgcgcaggggttcgagcgaaccgaacagcggccgattgacgacgaggacagatttgagtggcaattcgaccatgatcggaaggcgctgcagagacaggcgaggccgaggtctgagctggtttgtacgcaaaacgagcgaagatggtgtcggacggggtcgcagcgagtcgcggagatcgccgccgcctgcggaggtgtgcagtgcagcctgtaccgggcagccttttgacacctcccctctcagcaggcaggcaggcagctctggaccagactccgatgtactcgctacctgcgaagtctgcggagcttcactctcacgcgggtgagtctgtcgacctcgccttggcgcctgcctgactgagctttgaaccgatcagagccgggccgacgacgcgcggaagggctgctctgctgctgacctaccttcccccccttctcctacgacccccactcccagcacgtccggcccgctgccctcctcctttgaacagacccctctccctcttccgtcgcgactgtctctccctggtccaagatgtccgcgccgccggccgagtcgaagccgcctctgccggtgacgctggcgtgcgcctccgccgagcgtgaggccggcgtccctccggacctgatcgccttccgggctcgcgagggcaaagttgcgcgcgagaagaagctccgcgagctctgggagctccttccactcaaggactcggtccgggcggcgcctgggccgaatccagagactggcggctgggtcggcaactcgatctttgggccgtcggtctacaggccaccgcctccggccgctgcctccgacggcgcgacgtcaacggtgaggctagcgacgacgccacggcagaccgtccagggagctaggggatcatcagctacggccggtggcaaaagctcgtcgtcagacgactcggccgcccttttctctgccatcaacccaccgccacggccgtcatcccctgcgacgctgtcgccagagcgagcggacgccctccgggcgatgtaccaggaggagctcgtacgacgatgtgccaacccacatgcgccagacgcgaggcagttcgccggcgaggtgcgctcgcccgaggatgccgtcggcaagggcaaggagaaggtggtcgactggaaaggcttccggacctacctctgggagcgtgaagcaggtgcgcgtcattgtcgtcgactgagcctgctctgtctgtcacttggctggacgccagaggctgacactcagcctgccgggtctgcagagctctggaaagccttcgtcgacctagaccgtgaccacgacggcgtcctcggcatggatgagatgcaggcggccctgcggcaagcgggtgcgttcgagcgtccagctggcatcgatcagacatccctgaccctcgacgcctcctatgcctcctccagatatcaccttgacgcccgcaacgcttcaagacttcgtctccttcctggcctccaattcgtcgagcgccaggggtcgcgtcaccagcggaatcacatggctcgagtttcgcgacatgttcctgctcctgccccgaagcgccagcgtgcccgagatctaccgggtacgccccttccattctcttactcttgcaggccgtccctcgctcgcctggctgaattcccgcgtcctctgcgcgccgccggtggcccccagttctaccaggtccgcaaggcgtattccgatggccgtggcgccgctcggctcaactcggacggcgacgtttcaccctcgtatccgtcgcctccgacaccaacgtcgaaggcatcggcgaccgatttacaatccaggcggtccgaggccagctcaaatctttcatcgacgtctgtcggcgggtctgactcggtcgaagaggaggaggaagaagaggaggaagctgatggaaacggcctcagcggcatggttgccttgaagttcctcggcgcgggcggtatcgctggtgcaggtctgtctcgatcagacaatcgacgtcacaacatgtcgccgggcgctgaccttcgcttgctctcgtgcccccgctccagtctcgcgaacagcaacagcaccctttgaccggctgaaggtctttctcatcaccgacactggtcacccgtcacagtcggcagccgagtcttcagccaagggcgccggcttggccaaaattcgcgcagccatcgtacgactgtattctggtggcggcggcctgcgcgccttctgggtcggcaacgggctcaacgtgctcaagatcatgcccgagtcggccatcaagtttttctcgtacgagacgtcggtgcgtctagcccaagcttgtgccttcggaccctcgcgtcgagtgactgacggcgcgacgccctttttaccgcgcagaaacggatgctcgcccgctattgggaccacgtcgatgacccgacgcagatctcgggctcgtcgcgcttcctcgcaggcggcctcggtggcatcaccagccagtttgctatctacccggttggtccccttccggccccaggcttgctgcgcctcctcgctctgctgacccagctcgcctcccagctcgagacgctgaaaacagcgcacatgacgaccgccggcaaggaccacagtcgcaaggtcctcctgcggacggccgccaacatgtgggcccagggaggcgtcaagcggtactaccgcggtctgacggtgagtcgctcgctggttgtgcaattctgctgcgggtgaactgatccgacgggtgtgctacagctcggcctcgtcggcgtcttcccttacgcggccatcgacatgagcacgttcgagacgctgtgcgttgagacttacactctcgttgatcgtcgagctcctgacggctgtcctgatgcggctggcccttccctccctcagcaaactgagctactgcgaacacttccacctcgaagagcccgacacgatggctgtcctgacgttcggcgccatctcaggcggcgtcggtgcaacctcggtctaccgtgcgttccatcttgctctcgacccttttgcattccgacgaccgttgctgactgccttgccgatctacccctcaatcagcgatcaacgtcgtccggacccggctgcaggctgccggctcgaccggccacccgcaagagtactctggcttcctcgacgtcgtcaagcagacgtatacgcgcgagggctggcgcggcttctacaagggcctcaccgtcaatctcgctaaggtcatcccggccgtctccatctcctacgtggtgcgtcgcccacgagacggtcgactttccagtcagccccttgctaaccttctcacgcatggcactcccacaggtctacgagaactcgaagaagagcttcggcctatagatctcgcgtgacaacagacctcccgctttggccctctgtagactagcgcacgaggatcgcctaaaccctcccccttgcctccagctcttgcatcccactcaccggaagctctcttccgcccccctgcacgtctcctgcattctgtatcagcaaccttattcaaacctctgagctttgacgaggagtttcagagaggcgagacggtgtagtccgtccgagcgagcgtcgaggccagcaattgctgcgcgcctctcgtccagccgctcgagtcgacagtcgagcaagccgcttgacagcgaccagcagccttcaacgacagtcagctcgctcaacgaactctttctcggcatgcaacagctgctcggcagtatatgaacctgctgccaacgacttgagcgcactcgttctggctttgttgacttcggtcccccttttgccgacgcctgctgacccgacgctcagccgccgccccccgacggccgtgttggcttgttcgcctcccccgttgaggccgagagagatgtatccgctcccgccccctttcggctcgccaccctgcgttccacgctcacctcgacgctccagcgcccggcctgctgactgcatgtcgcctcgccgccgctgaccgccgacggcgtcgccgagctccctttgcagctctgtccaagcctttgcatgtagcgacggtgcgcggtcggattgcctgacctgacattcgaaggattcagagatcctcgtctttccagatgagaggacggaagctggtcggccgcccggtcgccgagctgaccgctccaagcaccgaaaggcgagccgagagcgcagacggttcatcgctctcgggcccgggccgtcactctatcgtcttccacgaagcgttggacgtccatgcaaggctgtctgctgacgagccccttgagagctgaaacggccaggctgcttaggagctcgatacctcgagaagtgcgctcgaccactcctctcccgccctcccaaccccccgtctctcccccccggctgccgctggctgctccgccaccacctcaccccgccttacctgcttccgtcggccgtagacgtttactgtctcggtcgaagacagcgactcggtacttcctgctcttctcttgttacaaagctagctcaccgcgctgactgattgacgctcggcaccggaccacagattggcgaggtcaagaccaaggtcaatgccctcggcaagcccgtcagcaagctgatctactcgggtccgtcccctccgcttcgttcaaacacatacctgcgagactgacgtcgagtcccacccgttctcaggcaaggtcctcgatgatgccaagacggtcgccgagatcgacatcaaggagaaggactttgttgtcgttatgttcgcggttcgtctcttcccctaacggctctcgcaccgcttgccacgggccatgcaggcgactgacctcgcgtctcacgcctcctcgctctgactgctcgcttcatcagaaggccaagccggcaccgaaagcagctccgtcggtcgccgagtcatcggcacctgcaacgccggctccctcgacgcctgcttctgctgccgccgccgcgcctgttgctgctgctgcctcgaccgacgctagcatgagcgagcccgcagctgagggagccttgaccgcgcccgctgccgatgcgccggccgctgccggagtctcgtccaacgcctccttccgtccgtccttgatctctctgttgctcgcgtgccgtcatcagcctcacgctgatcactctactctgctgcccgaacacagttgccggcgatgccctccagtcggcgatctccaacatggtcgagatgggctttgagcgcgagctcgtcatgaaggccctccgggcgtcgttcaacaacccggaccgggcggtcgagtacctgatgaccgtgcgtcgcctttcgcttcctgcctcgctctcgctctctgctgatcctttcaacgctctctgccaactcagggcatccctgaggacgttgcaccccctgcgcctgctgttccggccacaccggcccaagctgcgccgtcgactggtgtcccgatcccgccgacgccggccacgccctcgcccgcgccgacagcgtctgcgcctgcgccttcgggcggcgcgccggagaacctgtttgccgtgcgttcctaacacggccgtttcgccactgatagagggtctgactcttggctccttccccccttcgcaggccgccgccgccgccatgcagtcgcagccgggcctgaacgccggtcggggagctgccggagctggagccggagccgccgagggaggtgccggcggtgctttgcccgaggagctcgcggccatcaccaacaacccgcagtttgcccagctccggcagatggtccaggagaatccggcgctgctccagccaatgatccagcagctgatggccaacaacccgcagctcggtcagatgctcgcccagaaccccgagatcctgatgcagctcctcggtggcgaggggcttgacgggatgggcgacgacgacgactgggagggcggcgacgacccgatggcggcctttggcgagggcggccacaacagcactatctcggtcacgccagaggagaacgaggcgatccagcgggtgcgtccttctctctagatctttcctcgttcaggcggcggctgaccgactaaccctttttttgtagctcgagtcgatgggctttccgcatcagcgcgtactcgaggcgttcctgctctgcgaccggaatgaggagatggcggccaactacttgttcgacacggccggcgactttgaggagtaaggctcttgcccggccttggacaagcggcgcgctcgttcgtggcgcctcgctcttgtcgctttgagtcgaggaatctctcgcggccgcttccttccctcggtccctgccacgttcgctcgggtctgccgggatgcgctcgcacctgagggccgttgcctcttgcagcagcgccgccgaccctcttgatcacgatgatgtttcgatctattcgctcttgctcgtcgccgaccgtccagccccaatctcgagcgttcgttccggccgaggctcgggcggtccggcggagtcgcaaagtggagagcgggcggcgcgcgcgtgcgtcaaccctaagtcggagaaggacgcgtctcttgccacctgctatcactcttctgtccttccttccgacgacagcctggcgacccttcactctctctacttttttcttcgaaagaaaagcagcgctctcgcatcgctcgccctatcctctcggctggaccgatacctacctaggacgcgtttacgccctctggagtcgatcgaacgcgcccgccaccgacctcacctgtcgccaccgacaacctttcactcctggactcgctcgtgagcctggacctcgcgtaccgtcttgctaaagtcgcttgagctcattccagccgtcatgcctgaccctcgaatctacagaagtcgtcatcccacgcatcaatcccgctaccttagctcgccgtctcactgctcttgccttagactcgatggagtcccttgcccgtgagaagcgctatggctcaggctccaagcggcccgcctcgacccagtcgacctcgtccgcgcttgccgacgctcgtcgctcgccaaagaaggccaagctgagcaagcgcgagaagcgcaggaaggcgctcgagcagcacgagcgcgagctcggcgtccagcccggcgaggcctacgagccgccgtcgagccagaaacggatgaagctcgagccggcgatgtaccgtgcgctgctcgaggctgcctcgcctcgccgaaggaaggaggctgcagcggcggcagcggcagcggcgggcggcagcagctcgagccagcagcagcagcaggcgaggaaggctggctctgcgcccgtcttccgcaagatccagcagcggccgctccctcctccgcccttctacccttcgccttcgcggtcctcgcagcacccgatgcaggacgatctttcgctctcgcccgtccgttcgcaggctacccagggcggcttccctcctcggccaacgggcggcccaaacgaccgggacgcgacgcccctcttcctccccgagtttgacgacgagcttgccggacggatcattgccaggggcgaggcgcgtgaccgggccgccgctgcggcaagacgagacgccgcctatggctcgccttcgcgcggcgccggccgggcggcaggctcgaggtccaactcggcgtcctcgtcggacgaggaaggccatggtaccgagacgtcggctggcaacaacgactacgagcgcgagcgttttcccgactacgtgagcgagacgccggagcgctcaaacgccgaggctggcccgtcgtcgacggcatacatccacgtctttgcgacggacgacgaggacgacatcgaggacgctgacggcgggcgcggcgacgacgacgactcggcgacttcgcccaacgtcccggggacgtcggagcgctcgcttgacatgctcgtcgtcccgactaatgtccccggtgcgatcccggtctcggtccaagccgcgcaggccgcagccgccgtagcaacggcggcgctcaagagcaagtcaaagggcaagaaacgggcggcgccggcgacgtctgccgacgaaacggacccagcctcgctcccgcgcaagatcacgcgcaaccgcgagtcgtaccaggccaagacgacggcgatgtggatgcgggagcagtgcctgacggcggtcgaggccgacgagcgctgggagcgctatcttgtcggccggggcgggcacaaaggcgagacgttcaagctggcgatgaagcagcgcgagagcgtgctcgtctcgcgctggatgctcgacgacgagattggcttcggcgaggccggcgcgcgcatgcgggccttgctcgaccgtgaggagcgcgaaaaggtcgcaagacagaaggcggcgagggtcgtcgctgctggcgcggcaattcccgtcgcgggcaacagcgacagcgcggccgcaggaccttcgtcgacggcggcgcccaagtcgccggcaaagcggacccgcaagtctcggacctcggccgccaacgaggcagccgcgaccgccgccgtcgcctctgccgccgccgccgcctcctcctcaaccggcctcgtccccaagccagcccggtcgcactcctcaacggccgtcccccccgcagccggactcagctcgaccgcacccgctaccgccacccgccgcaagcccggcacgacgccaaccgcgcgcgcagttgagcttgtctgcctgaccgaggcggcccggtcggacgaggcgcgcctaacgatcgtcgacctctttgcgagcggcgagggccaccatgccgaggtctatctctcgctcccagacggcgcgctcagggcagcctgggtcgagcgccggctgcgggagaagggcgccgcgtaggcgaaggggggaacggatgacacactcggagggtatcggccacgaaatgcgcctctcttgcatgatcagcttgcttgcggaaccctctgtgcgcctggtgagcacgaaagcgaacggactcgcgttcctcggcaacgtcctttcgtcaaacgttctcgagcggtagagtctccatgcgatgcgggggtgcgacagctccctctaagccgagcgagcaaagacaagcaggatgtacagcgacaacaagttgggacaggaatgagtgagcgatgagaagggggtttgctccggggaatcaggcagatgcctgaaggcccaaggcgcacgcgaacgtgtagttggctgtagatcaagcggaagagaagagggctgcgcgtcagccgaaccgctggaggagcagaaggctcgatgccgagcacgggacgtacgagggaggaggtccccgtgcagacaagagagacgaccgacgcctcttcaggatcgacacagtcttgaggcgggcagcatagcttgtccctcacccctgatccccggcgcgtcgtcgtcttctcagtggtggtgatcccgcctggcggtcatcagccagacggccccgacgaggacggcgaccccgcttgccgtcgccgcaccgaccgcgagccactttgcgcgctgggccatctcgtccgccgccttgcgctcgtcgggcgactggccgtcggcagcagaaggcgaggccgacgacgagggcgcgacgagcggcgcccgctcggaaagggcgctgtttggtcgggcggtcgaggcaaaggcgcccgagaactcagtgctgaagggcgcaatctcgggcgagtgcgagcgcgacgagggcgagggcggcgagggcggcgaggccatggcgggagaagggggaggaaggcgcgagacgagaggatggcgtcggagggccaagagcgtccgctcgcgtggccggcctgtcgccgccctgtcgctttgtcgagcctgtctccagcccaccatctaatcacagctcgacagcaagatggacgcggaagagctcttcaagcggtcgaccgtccgtccgactcgccctctcttctatagttggcgcagctgatggtcctgtgctgtctgcaccccgccgccgccgcctcttccctccggacctcgtcctgactggcccgccacaggtcagcggcctgtttgcgacgctcctccaggaccgcgtgctcgacctcgcgctcgaggtccacgagcgtacgctcctgaaaaggctaccgtgcgaagtctgcgggacgctgtacgtctctcccggctcgagctcgttgctgctcgctcggcctgcgccttccctccgaccgagctcggctgatatgctgctcgatcccatcccctacccctgactcagttgcaaggccagcggctgtacgtggcgctacagctttgtcatttgagctgatactaagagccttgaccttgctctgccgaccccccttctcagccggccacgcacctcccccgccgcaactcgcaggcagcacgaccgcctcctcggccgccacctcgcgcgccaacacgcccgtcccctcggcaagcggcggtccaggagcgtcggctctggcgaagggcaagaagaaggactttaaccagagcacgattgacggctcgggcaatgcgttctacgactgtctgaactgcggtcgggcggtgcgttccgccgttcggcgattcctctcctgaccacgatgtccagcgcctgaaccatgctttcgctcgcgggtctcgccagacggtcagcaccaagtacgcaaaccacctgtcgacctgtctcggccttaacaggcggacgaccggccgcgcggcagcatccaagccgaggtgcgtttcgtccgtcgactcgtgtgctgctgcgcctccctccaggcggcggcgaggcaggcctactcgccctgacgggtcgctcatctctttcgatctgcctgcagtctgctcggtgcgaacggctcagaggcggacggctcgtcgaatggcaacggcaagagttagtctggctgtcgggcctctttcaaacttccccgctgacgctcggccgccgctcttccgcccctccctcagagaaaggcccgaaaggcgtcaacaagcgggtccgcccctttaatgatctgccttcggtcgtgcgtgactgcaactaaccagcccctttttgtcgacgacgcaccaggcggcttcgccgatgatgccctcgccaaagatgaagaaggccaaggtgacgccgctgtcgactagtccgtccgaccctccgctggcctcaaacacgtacgatccgaggctgacagcgggtggcctgttttcgacttgcaggcacacgcgcgactccagagcctggcgcgagaccgaccatctccatctcggtccctccgccgctggcttcagctgcgccgatgccgtcaaagctcgcagcgtcgcacgtcgctcggccgcccgacggtagtctggcatctcagcagcgctacggcgactttgtcggttagtcccgcgatgacgttttgggtttggacgctggacgttgacgagcggagagggctgaccgactcttgctcgcgccgcccgcagcggtcgacggcggcctgatcgacacggacagcgacgacgactgagcgtcactcgcccttctcgacctgctctggcagacctcgctaccttcccttgcatgttcctctcctcatcccacgccccgcctcgctcgcatcgacccatccacacatcgcccttgcccctttcttgtatcctagaccaccatgccagatcctgcccgaccggcctcagcgctcgcctcgctgctgaccgctctcctgctttactggctgactgcattgctgctccaatcgggctcatggccgtctgcagttggacgccggaccttctctcgagcgcttcagttgaaccgactcgacagagactgcgccctggctcaccaaacacgccccccccaccgcaggcgagagaaagcgctggccttcgagctggccacggccaccatccatcgccctcgcacgatggctcccctctgctttcacatcgacaaacccggcggctgtcggcacggcaccgcctgccgcttctcgtcgacgcccggtggtccgcccggccatcctccgacgacggcttcgacggcggccggcagctcgagctccttctcggctcagacctcttctcgcggcggcttccagcgaggcggcttctagcggggcggcttctagggcagcagcgcttccactcgtggtggcagctcagcctgtggcggcagctcaacccatggcggcagctcgaatcgcggcggcggcttccatgcaggcgcagccggtcggccgcagggaggccagtgcttcgagttctggcaaaccggccagtgccagtgcgtccgaccttggccttgatcgagactcccctcgcacctgctgacctgcccgcaacttctcaccttgtaggtggggcatggcttgcacgcgcatctacattccgaactcagctcagtcgaccatcgccgcctccactgcctctccgttttcgcgcgttcaggtcggcgtcgtcggcccggccgcgaccatcacgccgacgaccgacggcctttttgtcctcccaacctacccgacgacggccgaggcgcaccttcaactccgtaaatgggcgccgagggtgtccggatcgagacgccgcagcaggcctacccgctgctcgctgtctttctttcttggcagcaacacggcaaacggcggctggaccgagatagaccgcaatctgttccgccaggagctcgcaaaggcggacccgccgaacctcatgcaccggttcggcgaaatagtcagcctcctgacggcggtcgacgccgggtcgggctcgcgcacgatcctttcgttcgagcgcgggctcatgccgcttctcgcctacctcatcttcgattgcgtcctcaagtcgcccgccaagaaggaggtcaacgcgctctattctatcatccccaacaacttcgacgagtttgccgggaccgtcagcgccggcctcaacgcctacctcgcccgcggctcggccgagacgcctcagccgccgaccgtctttgtcaacgccctcaggacgacgactttccgtctccacttgctctaccaggtcctcaagacgctcgcgtcgctgttcgatgagttcctcggccgctggcgcgacgccgtcgtccacgtgccgcaggtcccggcgctcgtcgacaaggtcaagctaacgttccgcttctggtcggccgccatcacggcctcgcgacgacgtccagcagacgttgaccgagccggctcagattcatcaaggcgcgctcgctcatcttgccatgaccttctacggcctgagcggccgcgatgacgacctgtcgctcatcaaggacatcgcaatcgcaccgacggccgaggagctcgtcggcggtgccgacaaggtacgtcggtcgctcgggccgctcagcgaagcacgcttcagctgactctctcctcgtcgccaggtctacctgctggcgaacctatttggcgcgccgcaccacctaccgtggcgctggaacctcggctcgccgctccgggtgccgcgcgaaacaagcttctcggcgaccgacccggacagcatcctctcagcgcgcgagaccctcaaggcagagagccggctcgacgcgagtcaggccgatgcgatgatcgacagcatgacgcgctcggtcgcgatcctccagggcccgcccggcaccggcaagtcgtataccggcgtcgaactcatccgagtcctcctcgccaacaagtgcgggccgatcctcccgatggcctatacgaaccaggcgctcgatcacctgcgctcagccttcgacggcaaagtaacgaccaacattgtccgactcggctggcgctcggccgacgaggtcgtctcgagccttagcctcgagtcgctcgagatgaccgattagaattcgtggctcggtgggtgagacacctctcctcttgctctgcgacgagcacttgagcaggttgctgacgtcctttccccctagcgccagcgtctcccgcggcgtcagccaggcgcacggccggctcaagcagatccggcgcgagatggcgacctttcggcaagcatgcagcggcggtcggtcgactcgcacgacctcaagcgacttctttatcgatcgcacttcctccagctcgactcgctccttcatccacctgagtgggtccgccaggtagcccagacaaacgatgccgacggcggccagtggacgcgcgtcaaccgcaagacgggccggccgacggcgcacgtcggctattcggacctctggctcgacggcgacaacgtggccgccattgaagagctccgccggccgcttcctccggcgccggccgctccgacgacggctgctgcttcagtctcaaccgccagcaccagtagcgcctttggcctcttgtcgggccagggtgtcgacaacgcagacgacgaggacgacgccatctccgaggcctcggacgtctccggtagcacggcatcttcgctctttgcctgggaggcctgggagcctaaggaggacgagcccgctgctgagccgcctctgccgactcgccgccggctcggccggtcgaggagccggtcgtcggacctcagccccctctcgcgtccaaggccgcctttgtcgccacctttggtccgctgccagtctacccgacacagcagcgtccgctcgcccagctcgagacggctgacctctgggccatgccggttgccgagcggctcgcgctctttcgcccctggattaccgaggccgagaacgagcgtggaacggagctcgccgccagcttcacacggctcatcgacaagcaggcagaggcgcaggtcgagtatcaggaactccgggtacgtttcctggctttggagtcgagagcgattcctggcctcgtcgctgacctttcccctgcaggcccagaaccgagggagacttctccgcgaggccgacatcatcggctgcaccacctctggcgcggccaagctctcagcgctcatccaggtcggttggacagcttactctgtcgactttagttcccatcactgacgagagacgttcgacggccgctcagggggtctcgccacggatcatgctcgtcgaggaggcggatgagtgatattctctttcttcaccgacaaccttcctctcctgacggctgacgcgcccggataccccgttcactgcacgcaggccagattctcgagccgcacattctcgccaacctgacaaagacaatcgagcacctcgccctcatcggcgacccgctccaggttctgtacgcgctatctggcttctagtctgtctgttcttgagctccctctgatcgtttactctcatctgctgtaggccaagcgtcgataagtacgccctctcggtcaaaaagtaagaaacgaacgctctggctcgcgtctgtaccgctgtgacgtctcgcttctcgagcgccttgcgcaagaaggcctaccggtccgtcctcaccgcggatgcggcgcctcgagtctagcgctgaccttctcttctccttggccatcttagatgtcgcagctccaggtccagcgccgcatgacgcccgaggtctcgagccttatccgatgcgtgccggctgcgcgagttgcgagctcactcgtctgacacagctacttctccgtgtagtgcaccgctctacccgcgcctccaggacaacgagctcgttttttagcgtttgcccatcaagggcattgcctccaacgtcttttttctcgaccacgagcacggcgaaggaggctcggccaacgacgtctcgcggcacaatgcgtacggggcgcgtcgctccactcatctcttcaatccgaggactcccgctgacggtgcttcttcagatgaaggtcaagctgatcgtgtacatggtcggccaactcctctgccagggcaagtacaaccacgaacgcggcatcgttgtcctttgcgcgtacctgttggtcctcccttgcgactgctcgaacgcgagcagtgtgctaacgtcttgacccttcgttgctccatcttagcggccagcttgtgcgtctctgctccgctgaccgcagtgtgtttcgccctccttggccctcattcttcatttgtcgctgatgcagttgccgtctctaccagccgtgcgagcacctaccgtgcgatgagccctgcaaggagaagctcagctgcgaatgcccgtgcccgtctagtacgcctgcttggctctcgcaggccaaggagccaagccagccaataaggtcgataagctctcggccgatgtcttcaagcctggcaagctcgtcgacaagaagctctttgacaagttccgcaagcaggtcatcgaggttacgctcgtcaaggctgccctggccgaccagccagcgccgatccttgtcgccttcggactgaaagcgaaggcccatctcggcgcgtgcaccctctaggcctccgtcaagacggcgacggcgctcattcgtgcctacaagagcgcgctcgacatctgcaaacgacaagctttggccctggactgactttggtgtcgttgcgctttgcgtgcgacggagcgatggagaattcgcgctgccctgagtgcggtgcgacaaccggcgggcagcaccatgcgctcgtcaccggcaacagcatctcgaacgcgatagagggcgcctactgagcggcagtaccagtcgaagcccgtcgaggaggcgtgtggctcgcgaggaggggaggaggccggcccgtgctcgcttgaattgtttgccggcttgtgatatagctcatgacccttgacgacacctggacctttctctgccagtcgaatgctctaggctgaagctgtaagggttgatcctggtcctgccagtcaaggagggggagggacagtgggctggcacacgcgcgcgccgagattgagagcgccctcgccgcccttttgtactgttacacacgctccctccgctcgcttcactgtggttcccatcgtcttgcctcagaccttgcagaagcctgcggcggcgacttgacgaatgggcgagagggttggtgaaggagaagagtgcctgcaggcgtactcggccaaaatatacccgccaggactagcacagccagcatcatcccccaacatcttttggtggcgctctcaacttgcagtctgggcctaagctggtacagacaccgcatggttcattcgcgtcacgccggtccgaatacaacgactatcccgcctaccaagctgcaccaaattgcgacgagtccaaagcaaaaccccagctgacgtttgagaccaagtgctgctggctgcagagcgggcacgaatgggtcagtgacggccgcggaacctcgacacgcagaaggcaagacgggacgcactcgaacggcaagaagatgccgtcactgccattgagcggcaggccgaggtcggccatgtttgcgtcgcgtagccaggccgggacgacgtctggactaaagtcgggctcgtccggccaatcgaacgacggaaactcgtcccaggtaaaggccgtactgctccctcctgctgcgctactcggctgaaggaggttggagagcgaagaggaggtggccgtctggccgtcgagcatcgggttgatgcgcggcgtcgagggctgtgtgattgtgaacttgcgccggaaggacgacagcatgagccgtagtgtcagggcgtagctggcaagtgggacagattgaaatattagccgtgtggcgcaatttgatggtcagaggaaggaagagcagctgaggacgcaccgttcggccgagatgtcggagagcaggtcggcgagtgcctggacctgcgagaggatcggccgcggcgcgacctcatccgggtaaaggatggcaaccttgagcaggtagcaggccgagaacgtggcctaccaagcaaacgcgtgagagcgacacatcagtctctcagatgtcgatacaagagaagatcagggacttaccatgacgagcgactcgtgaatcgcaaagcggagggcgatgcgatactcggcgctgagaaagacatcgagacagttggtcgctgcgtctttcgctttgactggatgaagagggaagcgcaagagtcagtatctcgccgttcagttgcacggaaggcgcaagttggggataaagacgaacgggcgaggtcgcgctgctcggccggcatcctctcccagctgatcgcccggagagcgaggcagttgacgtagagccgggcgtagtggagctcggcgaggagcatcttgcggcagagcgagtcatcgccgtagacgtcgacgtgcatcgcgtcccactcctggtaccagctgagggcaaggagaatgcggcgtgtcagcgatgcactggagacgagcgctgaggttggtagcacgcacccgttcagccgctggtcgacctcgcggagatagtcgagcgtcttttgcgacgccgcgcctttgagcttttgaacgcggtcaaaggcgtcggtccggaggatgacgagctcaagcatagcgaccagccggacgtcggtgttgctccgcattggatgggtcaagaggaagcgagcgttggcgacgctctcgtcctcgcgcaggaggatcggccggccgttgccgagtccgtttagccggtcgaacctgggaacgcaaaggcggcagagagtcagcgcgagcatagtgagagagacgagggacgttgatgcgcaccagaagagacagagccagatacggcttgagacgacaaggtcgcgctcctcggcctcggtccggccacccggatggccctggacgagcttttcaagcgcgcgatggaggccaaaatcgagcccggcccggagcgcgtggcctgaaggcaggtacgagttttgcgagtgggtcgccagcaggaggattgcctggaccgctctgtacgcgaggtcgagccgagcagggcgtcagtatctcctccgcgacgatcaaaaaaagcggaggacgcactccttctgtacaacgggtccaaagagggtgcttcgggcgataccctgcgcctcgctcaggcagaccttgaacgtctcgccggtcgggttcggcccggccctgacctttgcggcgatcgcgagcaggccgtcgagcgtaaatggcgtccgaacccggaggtcgtcaaacgtgtcgtagctcgcgtcaaacagcgggacaaacagctgggcgcccgagaaaaagatggcgtagagctcgcgggcctcggcttcagagacgagctccttggtgacgacgtctgggaaaaagatgggcggcgcgggtgcccgcttgcggcgccgcatcctgagggctctgcacaagacgagggaagggcaggttggtcagcaagggcttttgacccgagtgcgaagcggccggcaacggcgggtgaacgcacctcggtggtgagagcgttccgtcggcggcggcggcagcggcgtttgcgagcccctcgagcgcgagtgacggcgccgacagcgttgctcgagggagggtgtcctccgactcatctgcgcatggccagcgaaagaaaggaggggtcagctcgctccctttccccgccgccgagcggcaaggttggccggccaaagagagagagagaaaacgtaccttccgacgagacggccgtcgacggcacaatctcgtacggcgcaaacgcatgcgtctctggcggagcaaagccaggcagctccggaaagcgcggcctcttgcgactgccgttggctgccccaccgtcgttgatgccggcgcccagtgggccggcaagaggctccgtcttgaacggccgtcggtcgcccgtgctgaaggcgtcctcggtgtcggctcggtagcccgagtcgccggcgttgccggacgacggccggccgcggcggagaaagtcgggcagcgggggaggagccatgctctccctctgctgctgttgttggttctgctgaagctgaagaagctgctgctgctgctgctgctggatgtgttgctgttgttgctggaggaaaagcgggtgcgggtggccgcccgagaggagagaagctgctgctgccgctggcgtctggacggccggcagccagtcggaccggacgtcggaaagagcaccagcaccggttgaggagccctcgccagcggtattgtgattggcgctcgaaaagaggtggctgccgaacgaaggcgaggccaggttgatgggcgagtaggcgcttgtcgggatgccgcctggcggcccgccggtgccgccgcccatcgagagcgtacccgacggtgtaaaagagaggccgctgcctgcaccgctcgcgctgccggacgagccaaaagcaaacgaggagccaccggtgaggaggtttggcggcccttgatgctgctgctgttgaggttgaggataatattgcgaagggcctccaagctggccggcctgctgtgacgctgacgacgactgcgagatggcgagctggcccggcgcgatcgcgagtgcggccgatggatggtgcgggaaggcctggtggtggcctgacgacggatggcttggcgggccggaatgcgaaagcgacgaactcgacgcgggcgagacgtgcgagccaccaccaccaccgcccaggcctccgccagagggcgacggctgagggtcgtgtggtgagagctgggcgctcgcgttgctgaccgatccgccgccgccgctgccgccaaggttccggccgctgagctgggcgagaatggcctcgagcgtcgactgcatgccgttcctgcagcgcgcgcgggtcggagtcagtctaagagagcgtaaggtgccggccttgcgaggacatcctcgacaagaaaaccagggaagggacacactgcatgccgccgatcttgaggacctcctgctcgagtcggccgacccggtcgccgccgccgctgcctccgccatcgagccctcctcctcccgaatacgcgaagcctcctccgccgccgccaccaccaccgccaggcgcgccgaagccggtcgagctcgtcgcgccgccgtcgtccgtctgcgggccctccgagagccgggcgatgcttgcccggcgcttcttcggcagcggcttttcaaagacgcagtcgatgccggccgtcttgcagcgggcgcacggggcctggcggtcgacgcccgagcaaaaaaaagagggggagcgaaccgtttcggtcagcctcgagatgacctctctctcgatgaattgagagggaaacaaagataggtgaggacgcacgacgccgtcgcagcggttcttgccttgccggcaggccttgcatgcgcgcgcgacgctagagccgggcgatccggaaagccgcggagagcgcgagaaaggtcgaaggacgacgagaggtccagagtgacaatggtcagggagaagcagggaggtgtcggtcagtctctgccatcggtcgtcgagaagggtcgaagtcgaacgacgggtccgaccgcgcgccttcgccggcccggcccggcgcgagccggaggggcggcggcgacaggaggaaggacgcaccgttctggcgagcatccagcgtcgtgtcagccaggcgtatgagacgagctagaagacgaaggaggacgaacttagctgcgagtcggtctctgctcgtgaagagcgacctcctcctccgccggctggcggctgggcgggaccgtcctgggccggcgccgggccggacgacatgtgcggggctgagggcgggcggcgagcgagcgagcgagcgagaggagaaaacgaccagacaggaagaccggacaggggacgagcggcgagtcgaagctagggtcccagccttgccaccttgcttgctatggattgaggcgagggtcgtgtcgaagggaggtcgttgctgatgggcttcaggccgggccctggttctcccgcagaggctcgcgcgcgctggccggcctgctgcggcggggctccaggtcctttgttcgcgcgcgagaactccgtctcgctgtgtcgtcggcacctgttggcgacagctcggccatcctgcaaaggtgagatgggagagtcgcgagggcttggccgcggccagatgcaccgagcacgtacgtacctctctcctgcaaagggcgagcttgcaatagatctgccggcgacgtgcaggcgggtcatgcttaactccgcgctttcgccgcccccttcgcaccagcgctccagcagccgatcaggaacgacctttgacccgaccaacagcccctccttcactggtttcataggatcgaacccacgtagacaagggccatccatcagctttgttcggcccagatggcgcgcccagcgaggtgcccacagcaagggacgtgcgcgctcgccagactgctctcagctcctcctccaactcgcccgtcctcaacctcgctcccgtcgtctacctcatcgtccccgccgccatcgtcttcgccatcgctgtctgccgccgccgccgtcgcctgaccggtcgggactaccgaagtcgcgagcgttgatgacgactctgcgcccgcgcggcggacgggcccctcgagctcgttcgggacgaggcagagtgtgcaaccctcgggcgcgtcggcgagggtcgctggcgttaggccaaggaggttgaggtagggcgtccgccagtcggtcgagcggtcgacgacggcgagccccactggcgaagcgtcggcgtcgtccggggtaggcgaaggcgattcgtcaggggtgaggtaccggtagaggatgacttgggcgggcggcaagggccgggtgccgccgccgccgttgacggtctggccgttcgccgccgtcgtgctgggcaaccgccccgccgcagacgcccgacccttgccttttgtgtccttcggcacagcagcagctgcaggtttggcagccgctgccgtccgatcatcgccatggccgtgcttctcgagccagcggtccagcgcgagccgctcgccctcggcctttctcgccgcccgctcgacccgctcgccaacgacgcgcagcgcatgctcggcgactctcgccaggccctcgcaccagccctgggcgaagtcagccgaccaggcccggcggtccgaggctgagagcggggcctcgccaccgagcgcaatcgagcgcagcgagggtagaggcgggaggatgaacgcctggaccgttggatggtaggcttccaaaggagctggcggcaggagcggtccgccaggccggccggttggcgccgtcgagcggagcgaaaaggtcgagtgcgccatcgagcggacgacgcgccgccggccggtgccgttcgatgggtactcctcggtcgtcaacctcgtgagctcgtccgcaaactgccgttgctgcccgtcgtcatcgtcgccggtctcgttctcagcaagggggccagcggcggtcctcgccctgctcgcccgccagcgtctctcagcctcgcgagccagctcgcgctcgcgcgtctttgcccgcccgaccccatggcccgcgacgagcttcccaagctcggccgcgcactcgcggcccttctgccggtcggcgccgaggaagccaaagaggttcgtgtggtcgaggacgaccgtctcaagctttctgaagcagtcgagcagttttggcaggtgcaggtggagccggacgttggtcgtcgacagatcgagatgtctaaggtttggaaatggtccgtcggcgccaatggtggccggggggaggacgagcgagggcacgacgtcgcggagggggatccggagccggaggtgcgtgacggctctgacggcaggcgagcaggcgagttcgctcacgcacgagagggcgaagaagacgattggctgagcaaagatctgtgattcgaatggccagaggcgtcagtcaataaagtcgataaatgaaggggcgacgagcgagcgcgagacgtacctttggctgcgagccggcaagtcggccatcgaggtaagggaatggcccgtggccagtgtaccttcctctgccccgaatgtcctccatcctcctccgctccaagcgctcgcgctcggcccgcgcctcaggcgactcgccagcctcgccctcgccctcggcgtccggagcagacgaggacgaagtgagcgagctcagggcggttgagaggctcggtccggcccgcactggcttagcgccgacggaagcgtcgacgagatgccggggcgcaacgtcctggacaatggagaggcgcgttaggctaccaccatcgctggcgtcggcgcctgaggtagccgcagggggccagcgggcgagtgcctcgagcgccgtgtcaaagtacgcgccggcaagaaactggtggtacgacgcccgatcgacatagggcctaataacatcaaagcgagcgatcgcaggaagaggagtcgtcagaaacagactgcatctgcggtactgatcgcgaggcaggtgccggcgggacgcacctgaaccggagttccagctggctcaagctaggcctcggccgctcaagcgcctgctcgacatgctcgggcgcgaacggcgtgccgacgttgagcgcgaggagcgagagctcgggtagccggtcgagcgccgtcagcacgagcgacggcgaggggtgccacgacgtcaggcggaaggagcgcgaggggggtcgatggcgccgccggcgctcgtccgcttgctgctgctcgctgtcatcgccgtcgtcgcagtcattgccgtcgactgaggtggcgagctgcaaggcatcgtcccacgcggcgagctcatcgacgagcgccccgagctggccaggccgtccaacgacgaggtgcctgtagaggagcgcccggtcgaccgccgtcgccgtcggtcctagagcggcgagcagggccgccgtcgtccgctggaggagtgcatcgggcactaggcccaatatctcgtgccagagctcgggcgggagcgaggcgtatgtcgtcctaggccgtgcaggcgggccgaggtctgtcgagcagtcatccgaggtcgaagggcgcatgatcgtcgggtgagtcgagctggcgattcggggcgagctggagggaccacgaggggtccgatgcggtctcagtcgaacgcagtcgctcaatcacaagaggattcctgatccgacattgtgatccggcgtgattgcttcggagtcgagcgagatgacgcgtctcccaagcgtctcgccttccatctccgatctcgttgcacctgacccccacctcccatcctgttgcccatcacgaagttcctccagccactctcgctcgttgccctcgccgcagcctctgtgcgcgcctcctccacatcaaccatggccggtgcgtccatcatccgggctgtcgtaagactcgcttgctcccacctcggctgacggccacccctaccttcgcttctgcgcccgccagacaagaagtacatcgtcacttttaagcaggacgcctcgaccgaccagatcgagcagctctacaagcacatcgaggccgagggtctgtgtcgttgcgtcccttcagccctgcgcccgactgacggtcccttccacaccgcatgccaggctcatccctcacctccaagaagcacgagtcggacctgatgaagtacgccgtcgtctcgggcttgcccgacaagctccagcagtcgctcgcggccaacgacattgtcgagtcgatcggttcgtccgcttcgtaccttccctacttcgatctgctcgggctgtagctgcgcttgaccctagggtcacgcgatggtcgtacgaccggaagcgggactgtcccggaagttgaccggtctacgagctgtcgcttgcaagtaaaggagctaacagcctgacattccctctccgttcgctcgtgctcggctacagaggaggacggcgaggtcaagacgcagtagaccgcatctgtctcgtctctctcgaagagcctcccaggcccgacggtagcgacgacgacctcggtggaacgcccgccgccgcttccagcacgcgcgtcgtccggcctcgaggcgcttacaaaggacgccgacgccgtcctgagccagctcatggcggcgggcgttccaccgaggtcgtcgtcgctaccgtcgtcgccggcgagcacgcacagggcgacgctccaggagcagcagcagcagccgccatcgacgcagccatcgccgtcgcacatgcacgaggccatcttccctgacgactctgacgacacgcacgccctctagaatcctcaccgccaccgaccgtacaaatcatgactcatgactattccgcccgttcgcaggcgatccgcaagcgagccctgctgttacccattgacttcagtagtgtcgtcgtccgtttccgtcgcctgcagcccctttccccagagttgacgccagcctcgtcctcgccggcgccagctggagcaccacggccgggcacggccaaagcagcaggcggcgaaacgccccgccggccggccgacgtcgcttcagccctcgtcgggactatcgctggcgccgcagccagcctcgatccgaagcgaggggtcatggagacaagacgggagctgacggaaggacggctggtggccactgacctgcaccctcctctttctcttcccctcgtcgcatcatgctgccgccatcccctccgcctcctgccatccagctcggccagccgctcgccatcccgtctgagacgatgcccgcccagcccgggtcagcttctggctcactcacaacgagcccggcccgaccgcagcatgccagcagctcggacgatgcggcagctgagccgacgacctcgctcttcagcttcttctcgcgcatggccctcgcccggacgacaagctcgggccctccgcacgaaggcgatcaggatggcgagcctctcaccaagcaggagcagatggccgccgccgagagacagctcgcggccgagacggcctcgctcggctccgacgaggaggacgacaacgacgacaacgagctgtcgaccggagcgtcgacgccgacagactgggacccgcctcacccatcgcggcccggacggaacggggatgaggccagcagcgtggacgagctgacgtggaccgcccaggacaagctcgcggccttgcagcatgagtttggagcagcccacgccgacgtcgactcgagcgagcgctggctggcggagacgtacggcggaccgtcatcccgcagcggcctcctcatcatcggcagcctgcacgtcacgtcgcaccgcctcctcttctacggccggatacctgcgctcgacaacctagcctccagcgcatcgcccggcccgatcaagactggcgcggcttggacgcagaaggtctacaatcgcttcggcgtcgagtcgacccaccgaaagcgcgtctggctcgagctcgaggccgacatggtgacgagctaccgcgactcgaccgagcgcggccggaccgagccactcaaggtcgtcaggctgtcggccatccgacgcgtcctcgaggagacgctaccgctcgtgatcgagtttgagagtgcgtccccgccctacaaagtcgtccccttgccttctggcagtcactgatcaacacttccgccttgccagtctacgatgccccgcccggcaagaatatcaagtgcctcgagttcgacacgcaagagtcggcgctcgcatggcgcaaagagtttgaagccgcgctcttcaaccacgaccgcaaggtgcggctcgcccgagcacctacgcaggagcaggacgagctcgcacaaggagacacgaccgtctcgctcgacatcccgctggaggcactcgcgtcccctccttcggtgtacaacccgctcggcatcgccacccatctcgacctcgcgctgcactcgcacatctccactggcttggcccggcaccagacggccggccccattgacgtctttttgcatctcatgatggaccggacgaacgaagactttgtctcgctgctcgagacggcaactcgggagcggcgaacggcagcggccggtgtcgacgctccgaccgtctacctccaagacgtcctcctcgacttgctgcgacgagacggcgcctctgggcccgttttcgaggacggcaccggtatggccgcgtttggcgttgcgcggtccgagcaggacgagagcgccgagcggatgcgccacatcttcggcctcggcgacagtaacggcctctggagtgcgttcctgccttctcctcctcctccatgcttgactcgccgctcgctgacgcctcaacgtttcggttccgcaggcatctcgtgcgccctgcagcgagccctcatcccccattccggcctgctcgtcatcagcccgcagttttttggcttctggcgcagatcttacaacggcaacgacgtcatcgtccgccactcggtcgcacaagtcgaggctgccgacgtagtgagtctgaagctgccccgccattagccagagaatctgacgctctgctgccttgctcttcagtgcccaaccggccacctctcgtcgtacggcatgcgcgtcaacattcacaagcgctcgaacctgtacttcgagttcgggtctgaggccgagcgtgatacggtcagttgtccctcgagatgcacacttgcactcagtcggtgcggacgcgtactgattttcctctcggactagaccctcgcccgggtgaacgagatgatcagctccttccaatcgacgctcgcggcggcgaccacctactcctcccgcaattcttcaaggtcggcaggaacctggagcccgacgtcgctctcccggtcgtcatcaaggtccgacaagtctggcatatcgacccgaccgcttctgaaaccgctctccctcgcctcgccgacggaccaggacagcctatcgctgtcaccgcagacgactcgcagccagaccgacgagcccgaggggcggcggccgtcgagctcagctgatggacgagcgatttcgaccgctgaactcgtccgagacctggaagccgaacgccactaccagatcgtcgccgggccgatagttagcacgaaggacgccagaagctacgccatcgaggacaaagcctacatgtgcgctgcgctcaaggtggccttccttgcaggccgagtggaataattgactgcttcttctcctccaggcacactcctcgcatcgtcaacctgtcggctacgatgcgcaagaaggcgcacgaggtgcattcggggctcaagacccggcacttctgcatgctgacgattggctcgcgcggcgacgtgcaggtcggtcgaatctgtcgccctcagcgacgacgaacgctgaccccgccgtatgtttgtcacagccctatgttgcgctgtcgctcgaggtgtgtcctgtcatctgagcccgccgtcctctctggttgctgatctaaatcatactgcccaacttacctagcttatgaagcacggccaccactgcacgatcatcacgcacgacgagttccaggagtgggtcgagggtaagtcatcggcgcgcccatcagagatcggctatctcgcttgacctcgacaccccgtttctttgcgtctggcaggctacggcatcggcttccggcaggcgggcggcgaccctgcggcgctcatgaagctctcggtcgagcacaaggtgcgcccggtcgcgatatttctccatcgctttcatcagagctgatgtttctcccttcttagatgttctcgcctggcttcttcaaggagagcctcggccacttccgcgagtggctcgaccagcgtccgttgcctgcctatgctttctcaccaagcggcagtctgctgatcgactccctccccggatgccagtcttccacgacgcttgggtcgcctgccacgacgccgacgtcctaatcgagtcaccatcggcgatggccgggtgcggactccctacttctgactcgcacgaagccctgtgctgacctcagccactcgcccgccagcatccacatcgccgaagcgctcaaaatcccgtacttccgggccttcacgatgccctggacgcggacgcacgactacccgcaggcgttagtgcccgccgctctctgatcgcatgccgaagccgatcgacatactgacctttggcaaccctcttcgtgacagcttcatggtccctccggtcgagatgtcaggccagttcaactactcgacgtacctggcgttcgacaacatcagtgagcacgctcgagcggtcctaacgcgctgcagtgtgcacaggctaaccggccgctcatcgaccagtctggaaggcgtccgccgggcaggtcaatcgttggcgcgtgaacgagctgcagctgaagccgacggtatgaagctctgtggaggaacagcagcgcgattctcgaacgctgaccgagtaccttgcatctacagaacctgacgcgcatgcggcagcggtcctgccccttcatctacaacttctccatcgccgtcgtccctcagccgcttgactggaaggacaacatgtgcgtcgccgctgctccactccatcgcgtcagctgataccgctgacattccgctctcacagcatgatctcgggctactggttccttccggccgaggaggacgagtgggtcccgccggccgacctggccgcctttatcgagcgcgcacgagccgacgagaagccgctcgtctacatcggctttggcagcatcgtcgtccccgatccggccgagacgacgcgggcgatcatccgcgcggtcgagcacgccgacgtccgggcgatcgtcgccaagggatggagctcgcgcggcgaggacggcaattcgagcgggaagaaggatgacatcgtcttccccgacagctgcttctcgctcgacaaggtcccgcacgactggctgttcgaccggatcgacgccgccgtccaccatggcggcgctggtacgaccggcgcgagtctacgggctggcctgccaactattatcaagccttggtgtgcgtccctgccgtgcaatgggcatccccgggtatcggctaactaacccccttctccatctactcagtcggcgaccagtacttttgggcgctgcggatccaaaagcttggcgtcagtcgcattccacccttcaccctgctgcccagtgccgccgactgacagacttgcgcaccctctcccctaacttaccaggccggcgtccgcgtcaatagtctcagcagcgacgagctcggcgaagcgctcatccgggcgacgcgcgacggcctcatgcgcgagacggcctgggcaatcggcgagaaaatccgggccgagaacggctgcgagcggacggtacagtggctgtactcgcacctgcggctggcgcgtacgtccgcctcgatgcctcttttgggcatgcggccgggtgttgactctcccacctgcctttgcccccacttccagttgaccgtcactcgaagccggtgacgaggccgacctcgtccgcggcgtcgagcgtctaccgcgtgccgtcgatcgtccagctcagcggcggcaagggcgcccgtttcgtccgcggcatcggctcgctgctaagcggccagcgggccaagagcaaggttgaggagtaggcggtggggcgttcttgatgactcgaagagacaaaggctgcttaacaggtgagcgaagggcaggaaggatgcttgtcactagccgtcgaacgcgagacagacccagtggcgaccaccgggtccaaggcccgccttccaacggaagacggcggcggcagaccgcggaggaggagggggtttgtcgagcgcgagttgtcgacgccggtccacgtccagcccaccctctcgggcagggccggcgctcggatgacgcccagcttaaataactgctcttgtggctctcaccttcgccccggtcacctgcagagcagggagagggggcctgcctcgtggtaccgccccggtcttgagaagctcggggcagtgtgcggtcctcgagggatgcgcggaggtggtttgagggctgcgagcgatgagattgaccggcgagctcgaaaagggcgcgtcgctcaccctgggtcacgtgcggccgcaccgccagggctgcctgccctgccatgctccaggcggccatgacgacgaccagagaccggcaacgacgcttgcaagcagcaatcctacacagtgcgcagccctgccagcgccgtggttaggcagtcgaggtcgctgatagcttgcgcgctctctctggcagaatggcccagctctcgtcgctctcgtcgacgatcgccgtcgcgctcctctcggtgtgcgttcccgacctccgcacctttccatgcgcctcgggactgatgacgactgcctcgctcgatcgccagcacgtttggctactggctcggcattggttccaagctcggcatgtcgcgcggcgacgacgacgacgacgatgagcccgccgagctgaaggtaatgcctgccgagcccgcaccgagcgcgagcgagaaggcatctgcggtcgctccggccgccgctatcgacagcgcgcggcccgagaagctcgaggtcgacgacagcgacagcgaggagggcagtgacgacgagtcggaggacggctttattgacgggctcgacaagatccaggccgagggggtcgagccgtgcaagatggtgcgttcggcccacgctcgtcagggaccgcctgcgcgctccgcccctgactctctttgcgctccggtcgcaggttctcgtcgtccggaccgacctcggcatgaccaagggcaagattgcggcccagtgctggtcagtcgcgagacgggtcgtcaggcctccctgccgcgcatccgttgctgatctctgcgcacgcccttcctctctcagccacgccgccgtcgcctgctacaagatcatgactgcctccaacccggctctgctccgtcactgggagtacacggggtccgtcgtctcccttccttgaacgatcggcgacccgccgctgactgtgcgccatcccacgcgactcacctccgacaggcaggctaagattgcgctccagattgcgtcggaggaggacctgctcctgctcgaggcgacggcccagagcctcaacctgtgcgcaaagagcatctgcgacgccggtcggacgcagattgccgccggaagccggacggtactcgctatcggacctggtgcgtcgacatgcgggagacgacagcctccatcccttgggccgcatcgctcactcagacttcctgacccttaagctcccgttcgactcatcaacgaggtcagttatcatttttcctgtctcttgcgctttgagcagagctgaccagtttgcctcccgcccttatccaggtcaccggtcacctgaagctgctatgaaacttcgcatcgtcatcccgcgccggccgcaagcttccgcatcagtgggaatcgccttcccaagactgactcagtcaaggctgactgtatcggcccaagagggtgcgatcgctgatttccgcgctactcgcccatcttccgccttcttcgcggaggatcctcgccgcgcgtcctccaacccgacgataaagccctcagcccgacgaggaaaggacacctgttacgaaacaacaaccctttcttcacagcactatccaactgttgcttgaatgccttccgttccatccccgctcgccggaccaccgcgtcgcccttcctccaccgtttctggtttgctctcccaaactctagcttacctctgccgacccttgcacgtctcctcggaagcgctcgtgcgtcctcgtgcgcatagctgcaaccgaccggacgccacgcccgcgctaacgctcaccgggtctcgcctgcgacctcgcagcttctgcccgccgtaggaatcgtgtgcgcgctcggctcgttcgtcgcttacacgagcatcgtagagtcggcctacgctcccactcatcgctcgcggcgcctgccgcaccgggcccacgatgagtgcgtctgcgcgctttgtcggcgaccactgtcgacgtctgacctggcgacccgctcgctcctcagcagcaggcgcgtcggccggagcccttccctccacggcaagcagataccggctcgcctctgggattgctgggaggatgaggaggacgacatcgtgcgcttctgggcagttctctaatgatgcgatggaccttgtgcaagcaggggaccatgagtctcgatgcaaggggaatggcaacagaggccggcggtcgtgtctagagggttacaagggaggagccatgcgagatgcgaggaggatgaggaggctgcgaggaggcccgagaaagagactgagaagagcgtggaggaggcgctactcgagcgaccacttgccgtcaccgccgtccttgatgaggatcggcttcttctcgtcgagcgagcgccggccggcctcgaggatggccgtcgtcagaaccgtgttggcaatcgtcggcaggtggtgggcgtcgtactggtcggccgtcgtgttgccggcattgacgtcgcggcaggcgtcgacaaacttctcgagcgagatgtagccgtagccgcgctggccgtcgaaccgaccggcttcgtcgggcgagtacttcatgtaaaaggggttgaagtcgatcttgccaatgtcgtcgtcgacgacagagtagccgcggtgggcctggtcgacccggacctcgccgccgtgcatcatgcaatggaagccctgctcagactgaggagagaggtgaggggcagagtagcggtcagctttcggggcctagcactctaagggacgcaggttgcgactgacgtgaacgccggccttcataggcgcggcccacgaggccgtgtagacgccgacgccgcgctggctcgggtcctgcacgccctcccactcgacgaggagcgtgatcgtgtcctcggtctgctcggcgcagccgagcgaggtcgcgatgcccttggcggccgaggcgttgacccggaccggcttgaacttgccctcgaccatccagcagtgaatgtcgatgtggtgcctgtcggagggatcgagaaatggtgagtgataaggacgggagaggcctggctggcgagtcaagacacgcacgagttgaggtagtaggagatgtccgagtcgatgccggcccacgacttgaacgtctcgagctgcgacttgggctgcgacatgtagcctggcaaagagtacaacagggtcagctcaagtcttcaacaaagggctgatgagggcggggacaaaccagagaagaacgaaaaggggccgagcttctcggcgcgggcccgggcgtcactgtaagccgggtcaaagcgcttgtgatgctcgacccagcagacgagtcccttggacgcggcgagggcggcgagctcgacgtggtgcttgagcagctgcgtcgccggcttggtgagcatgacgtggtggccctgcgaaaggaagaaggtgcgcgcagcagcaaccggtcgtcagtgatcgtgacggttccagagccgacgtctggcccggacgggatttagttgagacgcacgagctcaagagcctccttggcgatcgggtagtgggtcgagtcactgtcagacaaaaggtgaggatgggcaggcaaggtcagaaccgcgtcgcgaaccgagtcaaaagcccgcgccggagagccgaaggttgacgcacggggtgaagatgatgacggccgacttaggtggaagctcgcggagggcctccttgactgcgaccgaacgccgaggtcagctgagctgcattagtgcaaggaagaagaggcagcaagacgcacaggcctcggggtcgcgcttgtcctcggcagggaagcccgtgaagtcgaggtccataccgcggtagacggagccgatgttctagcaaagcacagaggcatgtcagcatttaagcggccgactcgctgcaatactcgcagacttaccttctcaaagtgctcgcggatgccagggaacttgctgccggtcgtgccgaccatcgacagcttgtcgaccttgagccgccggcggaggtcgaacatggtcagggcgacgacgccgatctgacagaaggggggtgccaggtggatcaggctcgtgcgcgttgggtcaaagtgaggaagcggcgcaccttcttgtccgacttggactggccgccgccgacaaagccggtcgtgtactcctgcagaaggggaagacgtgcgaggggtctaggtcagcggccggaggaggaaagcagcggcgcgaacagctcggatacgcacgccggtgccggccatcaggacgttgagcttctcgagcggctggtcggtcatctttactcaattctggaagaggagtaagagaaagagagggtgatgagagttgaagggaggggaggagatcctggccgtcctttgagggaaagccggctcccgcgaagtgccccggcccggcgccggtccggtcggctaagccggccgcaattcaagcctgtcaggactagcgacaccgaaatcagaagcgcaggatcgagccgtcttgtcgcgtcgcgcgcaagagaggaggagagccaaggcccaaggctcagacgccttgttgcttcgcaggctgggcgaagaacagtgcctcggtcgggtcggccggtgagccgcaggtcggccatgcgcggcgcgcagctcctgggactgcagcctctgttgacgatggcagccactcaactcggttctagcgcaacgacagtcatgctaagcagcgacgtacacgagcagcgaggcagctccagtccattgagcttccggcagcgacgaggcgcccgcccttacacaccgccccatcgcgcaaatccccgacgacgcgcgacccattggagcaacacagcgagcatctttacaacagcgagatagatcttacagcaccacagcagaggcccctaggcaaacttgccgacggccgacatgcatgccgcgccgaggaggatgaagctcattgcagcgccgaccttgggccaggatgcgcgtcgcatctcgccgtgcataaagtcggcgacgaggagctcgaccgtcgcggcgtagagcaggataccggctgccaaggagcgggggcgaggagagagatcagcgccatgcaataaacgtgggatgagcgagtagacgcaccagatagcgagttgaggacggcgacgctcagcaaagcagaggccgagtttgggttatatgacgactggagggccatgccgatctgcgaaggggagagcgtcagcctggcaccctcggcctttccacaggcagtggccgcgaacgtactgccatgccgaagggcgtgatgaggccaaaaatggcggcgaggagccacttgcgccagccttgaccggcgggccaatggaggagcgcgatgcgcgagccgagaccgagtccctcaaagaactggtggacgcagatggcgatgaagaaggagagcctgttggagagggcatggtcaggaagcggtcccgaccagcagagcatggcgaagtgcagatcgaacgcaccacgacgttccactgccggcgccgagcgcgacgccgatcataacacttgagggatcgcgaggatcagtgaatgttcttttcgaggtcggagcaggaagaatggcacacctgtggaagacaacgccgccttcgagcagataaacgtcggcccgggcctgcttgcgcgcctcgagctcggcctcctcggcctcttcctcctcacgagcgcgctcgaccgagcgcaacgaatcggccgctttggccgccgccgctgccgccgcctcgctcgacgtcgctggcaggcccgtctgcgattcgaggtctgtcggctgagcagccttctcccgtgctgccgcggcggcagcagctagcctgccgatgccaccggacgggcagaaatgcaagtcttcgtcgccctcggcgtcgctgtcgttgtgagtgtgcgcgttggcggcatcgtcgtccggtgtcgccatgcccgatccgatggctgacgtgtcggtctcaccctcgccctcggccgccttggccagagcggtagcagcagcgtccctcctccgtgcgagggcgcgctcacgagcgcgagaccgcatgaagcgggcgagagaatagtcgatgaagctggatgggcgagggtcagggagtgcctcgagtcagcccagatcctcgaaagtcggcctcggccggtcagcctcgaggcgctgccgaagcctctttacacgcacaagatgacgagtagactggccatggcaatggccggggcggcaggctcaaatgcaaggccgccgatgcacgggttcgagaagtcggtaaagctctcgaacagcactggggggagggcggtcatggtggatcagcgtgaatgcggtgtgtaccgggtaattaagcggcgacgggactcacggtgaacaaagctgtcgcaggcaacacgagtgggccgaggggcagatgtcagcgatccaaggcttgtgcccgctgacagaactggagatgcccggccgcagagactgctagcgctcaaggccaaaaggccggaagggagaacgcacgctgtcgccaggaagacgcccgttccgaaatgacggaagccaaagaggatccggcgcggccacttgtgggcgaggaaggggagcgcgacgaggggactcgagcagccgagcagggaggtgccaaggacgacgctgcgggcgagggacgagaggcgcacacgcgtcagctcccgacgatgcgagcatagggaacggttgacgagtttcaatggaaggtatttcaggagaaggtaaaggacgaacaagagggcaatcaggtgcagccggaggtcccactcgccctcttggcgctggcgagcgcacttgtcgtcgaccggcttgcagacccagaccgcatgttcctcctggaaagccgcgcgcgtcagcagcagctgagggggcttctggatgggcttaggaactgaccgagagcacgcaggttgccgggtcgagcgaggtaggatcggtgcaagcccacattcggcgactgctgctgctgttgtcgtcagctgccgcggcggcggcggcgggcgagcacgcccagccctcgggtccgccctcgccgagctgccgaacggcgagacgttgtcctccgacggagtcgctgctgctcctgctgttgagggcggcgatctcgagcgacgaggtgccgggtgcgggcggcagctggtacagctcggaagctgcggcggcatcggtgacggcagcggcggcgtcttggagcagcccgtcggtcgcatcggcggcttggacgagcgaggctgctgctgccgctgctgctactggtggcaggaggaggagggagagccgcatgcgtcgcgctaagaaagagagaaggatagcaagctgcgagaggcggaagaagggtgaaggtcgttcggagcggggacaggcggtcaaccggggacttggcgagacgtgcacgatgcagcgatgcgcagcggacaagagacggcggccgcttcgacgaggccgacgagccccgaaccagtcggcggggtaacagattcttctcgctcaagcgacctttcttgctttatgatgtgatgactgcagttgtcccgtctacttacctccttactctgcaccggctgcgtcctcggccgactcagactggtgagccctgccagtgccggtctgcacccccaggcacacaactctacgtcgaacgatgagcattcagatcgcctctgcaggcaggccaccgtctccatccatctcggctggccgcggatggcctccccatcgctcggcataatcccaaatatgcctgctctcgccgcgcacggctgcgaggcccatcaccgaccgcagcatgacgagtgccgaaaggagataggacaagggccccacgacgatggactcgacgtcgggctgttagagcgaagtggcgtcgagtcagcgagaaagcttgagatgaggtgggcagcgggactcacgtctcccgacgaggctggaggagctgcagcaagctgatgatcacgatgacggcaaaggccgccgtctttgcgtaggtgacgccgaagagtgtacgccaaaggatggccggtcgagagattccgcaggcttgcagccgatgaccgccccagcaacggcaatcgtacaggccaaccgacgtggctggccggagaggccgaatagccgagcgcctggatcttctgctgatcagtctataggcgcaccttggcagcctcgtccgtctcctcggggagcgcctcttcctgagcgagcgcggtgtagaacgccgaatcgtctgcatcctcaatcagctgctggtccagccgatgcagcatgccgacaattggcgaatgaggtccgagtgagaagccggcgacgagggccgccttgttcgagggcatgtcgagcggtggatcggtcgactcgtcggcatcgtcgtctggggagaaccgctggatgatgctgccgacaggaccgatgacgaggaatgtgcacaagagcacgccggtcaagacgggcgagaactcgaacaggagcccgacgagaaagtacctggcgacctggatggcgaccatggccgcgagaccgaccagcagccaggctcaggcacccggcttcgcctcgggcgcggtgctgctgctcgacggcgtctcgggcatgacgaccggcggcgagacgacaggcggctgcgatccggtcgccgcccttggcgggccgcggacctttgagctcgcgcggtaggcgtcttggagggtgatcgaggcgaggtaggacgacgggcagggcgcagatgttggcggtcgcggccgacagggcgggcagctgcatcgcgagcgaggccggaaggagggtgggtggtcgtcaaaggcgggatgctcgtgcgagcaggcagccaagatgcgtcagcgacgacgacaagacagcaagcagacgcggtgggtgaaggtcggtcgacatggacgagattagatggagcggagccggtcggcaagaaggcagcggcgcgcagcacgactgtcgacggcagtcgcagcaggcactcggaagggagcgccagctggatggtcaaacaggtgtgcagggtccagaggccagagcaacgcttgcagcagaagaggtcggtgtcttgacaaaggtgatcaatctttggcaaggatatggaagggggggggggggctgaacagcccgcgacaagacttgagaggagggcggcggatatgtactacaagtcgaccgggaagaggagaagggaggaaggggtcatcagggaagggaaggagagtgtcggccgtccgagtcggttgttcgacccgggacggcgcgctaagttagagagcgtccgaaaaggtggtggaggattgaaacgagtgtcaagcgagagcgagtcttcgaccgcatcggcgcgaggggtttctagaacgagccagtcgcttagagggagaggaggccgaggagctggttgaggccgaggcccgagaggaggttgccgagaccagcggcgccgccggcaccgccagtgacgccaccaaggagaccgccgaggaggccgttgagcgagaggaggccgaggacagagttgaggaggccgccgacaatgttgttcgagccggagaggaggccggtgaggccgccgtcggtgagcgaggtgacggggccgaggaggccggtgagcgctccgaggtcgccgaggccggtggcaccggtcaggccctgaacgcccgagagggcagcgaggacctgagcgacgaggccgttcagctgctgggtggcggtgagctggccgaggatgctcgagaggaggccgttgacggctccgccgccgacgaggccgttgacggcgccggcgcccgagaggaggccgaggatgacctggaggagctgctggacgagaccctggaggccggtcgtgagctgggggaggttctcgagggccgaggtgagctcagcgagctgggcgaccgactgtaagggaggagaaggagggtcagtgccaagccgtgttaagcgagagatgtcggagggacgcacgaggaggggggcgagctgggcgaggatgccgtcaagtcccgggatgccctgaatgccgccgaggccagggagtccgccgaggaacgactcgccgacgagcgactcgaggttggcggggttggtggcctgggctgtaaaggagaggatctgggtcaggacgatggccgagtaaggaatgagggaaggaaggaggacgcactgatctgggtgaggatcggggcgagcggcttggtgacgcccgagacgacgtcattcagcttggtgacctgcgagttgccgccgaggaggccgccgaggagaccaccaccgttgcctccaccgaggaggccaccgaggaggcgcttctcctcaacggcggcggcgggggcagccatgaccgacgatgcggcgagggcgaaggtggcggcgacggcgaagaacttcattggtggagaggaaggaaaggcttgagggtgtggggagtgaaggggaagtgaaggagagtgggatgaggagaagaaaaggacgtcctgccttgggggtgcgccttttatgttgtccgtctcctcccggtcctctcatcgtcccgggcagatgaggtgcgcgcctctccttcgcacgctcggtcgtcgagaacgcgtctagcccgccgaccgttcgtaacaaggagttgctcggcccgctcgcaaggttgcgagctagcggatcagcagccgcccagggtttccctcgacacggtcgagggccgccagtcgtggggcggcagcgggtgcctggccagactgggctggcgggctggccggctggagaacaagggaggtcgtcgatggacgtgcgcttggtccgaaggtttatggtccggatggacggggtcagcccgcctgaccacgttagcgggtgttagcttcagagggagaggtgcgagtggggaagtggacgggaggggtcggttctcgaacggcaagacggtcgggtctgaggtgcggcggtgtgcgagaggcgagacgagaaagagggaagttgcgtgcattcggctcgtccaagcgtcggcgcccgccagttggtgcgaagtggtctgggctgaatgggcgacacagacaaggaggtgagagagggccagacccaagggcgtggctcgcggccgtagagagccgcacgtcgagcctgggattgatattctcagcctggcgctcgctgagacggccgccgccacgagcaggtcggctcccctcctcctcctctgcagctctcgcctctcatcccccactctgaaccttggccgcacgctgccggtttcgccgagggccggcgcccgtttcgcccgcatctcctgccgtgtgccgaggagcgagcttctggctaacgacgaccccttgaccgacggcacgccatgacgagcagccagtcgagcttgcccctgccctgctgaaccttgcgctcactcttccctcgcacagtcatgatgggcgcctgttgctgtagggttggccgatcgcacacgaacgaggtcgcactgccgacgtcgggccaaggacgccagccgcggctcgccatgtcgtcaggcgacgtcctgaccgagctagcagaggtcgctcggcggatcgagaccttctcgactccagacgtcgaggtgggctctctctctcttgcccagccgctttcgcaggctgacgaccgtagacgcgcctgccttagcgtttgcccttcgttcgtcgacgacgcgtcttgatgtcggacccatcgttcctgcccggctgccggctgcccccgtcgcgctgagacctcgccgcgggcgggcgcggccacgctgacgcgactccttccgaccttacagccggtgctcaagaagaagaatgcctgtgtcaaaccatcacctggctgacccgaatcgccaacttcgtcctgccgaccagcatagagggatcctccttgaataagacgagggtcgtctgcccttcgagctgaccgcgaaccaacctccagctcgtcaaccatcgtccggtgctctgcttccgtctcgcgacacgcgccagcccctgcctccgctctcctcgtctcacagcatcggtcacatccgacacgccggatcatccaaggaaaacgcctctctccatcgggtttctctccgagccggcgtcacccttgcagaagggcaggcggacgacgccagctctttacctgtcgacgacctctcgcttcggacgcagggacacagctctccgcgcagcccgacatgcgactcccggcacttcactcgttgccgctcgctgcgctcagcctctgcctgctcacaggcggcccccgcaccgtctctgcctcgcccgtctcgggcaaagccatcacgcagctctcgccgacggctgttcggcctcaggctcgcgcactctcgaaggccatctgcgtacgttcttggttcgctgggacaaaatggaggttcggcagaagctcacgctggttcgacttgcttccggtcgtcttcatcctgcaggcgccggtcaccttcacgaagcgagtcgccctgcttggtctcctcggtgtctacagagcggaatttagtgcgtccacgcgttacccagctttcagtcgatgccgttgccctggctaaccgctctcccccttcgctccatcctcgaccgcagacaacttttgcgtctgcgcaaccgccgacgccaagctcaccgccgactcgatcaggcggatcaacgaccgctttagggaaaccctcctgggcgccgtgttcgcggccctcggagacgttggactcagccgtacgcaatttgctctcgagccctacgctcgcctgcgttgccttctttgctgatccatcccactcggcccttgcctgcagtccttaacgtccccgtactagaggttgagacgcaggaggcggcgctcaggcagcttgagctcgtcagaacgccgccttgcgactacaagacgtttgtcgtcccggactcgtgcaccgactgcacgtccttcagtgagtcgcctcggatgctcgacttgccgtctgctgcctcacgcagctgatcatgcgtgtttggcagcctgcatgttcggctacacgcgatgtaatgacgcgtgcgtgccgaccggccagccctgcgcttcctcgggcgcccgcaagcgctcgctcgcgacgcgttcaaagtacatctgtccgctggacgagacgccctgtccggtcgtccgggggacgaccaaagtctcggccgtgctcgacctcaaaaatgtcgaatgcgtagcgatccgacacaagctcgagtcgtgtacgtccgtcttcgcctcgctccggtcgaggcgcaaactggctgacgctcttctgctcgtcgcaggcggcggctgcctcacacccttccctggcgggtcgcaagggcacgactgctcgcagatcccgaacgcctgggacgtcgcgtgcgtcgctggcgactgcgtcgtcgacgcctgcgcaccaggctataagccgacgagcgacaaggcggcgtgtgaaggggttcggcctggcgtggcccagggggaacgacgacgatgcttgccgggacactgtaggcgcccggcggggccggttgtgcgccctcggccgcctgcgcaggaccaagcggcctggcaggccgtctcggccgccgccgccgccgcagcagcagcgacgccgacaatgacgatctctgcagcgaccgtcggcggcgcaggttcgagttagcttcggacaagccgtcgacgatcgacgcttgcctccgtcgagagcaacaccaagcagtcaccaaactcccctttccttgtgcctgcctgccgaacaaggacaacaaggcccggcgtctggcgcctgcttcgacgtcgaagaaagcgaccggcggccgtcgccttgacaaggacagcccccttttgttctgcagcctttagcttagattggccggcccttttgtccgccgctgtcttcctgtacttacctctcgtacagcaaacccgtactgtattctgtccctctgcacgtatacaatgctctcgtactctcgtgaaggagagccggcggacgaaccccaaccggactgccggagactttttttctcccgtcagaggggggtcggcagcagtcgagggggagtcgaggcgggagcgcgtgggaccaccgcgttcccaacgcgacttggctttgtttttccgtcgcgcgctggttgtcggccaacccgccccctctctcgtcctcgtcgttccgccaccgacacttaaccctcccttcttccctcttgcccttcttcttcccctcgcagcaaccctccttcctctcgttaccttcagcaacctccgctactccaagccggtcgtcatccacccccgacgttcggagtcgggctagcatctcctccgccgcgcgacacctcttcctcctctctatccctcaacccgcgccacacatccatggcgaccgtccttcacgcgccgtcgtcgacgtgcatccagcctggcccgccgcccaacaagttgcaccatcgccggtcgtccgccgccttgcaccaccggaccatgtccttcctctcgacctcgacctcgtcgtcgtcgctccattcgctcgcggccgcctcgccgagcaagcctcggtcagacgtcggcggcccgcccgtccggcgccagctgcactttggaacaaggccctcgcccaatcgacgtcgacctggcgggcgcgtctcgtcgagctcgacctcgtccgacgatgagctcgccagcagcagcccgagggcgagcaccgccgtcgtcagcgcggcaggcggtcgtcgaccggcgtaccggctcgacacgacgagcctgccgccgtcgagaatccccgtcatgtcgccctcgtaccgctcgccgtcagcgaacgttgcccggccagcctggggcgcctcgccgaccaagcggtcgacctcgttctctttcaaccggccgccactgagcatggccaagccgctccagccaatcttcgtcccaagcccgtcgtcgccgctccggacaacacggactcacgccagctcgcttctctcaccggagactgcgttcgctgctgccgacgagccgccaatctcgcccgcctcgccctcgcccttcacgagttacctcccgccggtccggccgctcgagacgggccgcgttgccgttcgtcagacgccagggtcgtcgacattctcgggtagcagcaggaaggagcgctcgcccctggcgtggcacctcgatgacagcccttcgacccttcgtcgcgagtcagcgccgtcgagcaggtttctagtcgatagcagcaacagctcgctgcactcgcccttccgatcgctctccgaaggtcgcctcagggccgctcggaagacgcctccgtgcgtccttccccttccccccccccctccccccctactctagactttctgagatggcacgctgcccccccagtgcagactcttgatcgccaggcgtcattgctagagatcatcgcttgcgcttgccaccaccgccgccggcataaggtccgctcgcgctcatctttgcgagctcggacgtgcccgcgacctgataatcgccggcgccgacgatgccgagcacgccgcccttcttggtcatccggccctggcgccggacggcctcctgcatgcgcttctcaatctcgcccttgccggcgtcatcgtgctgctcccacttggagcccgccggccggacggcagccttctttttggccgatgtcgtcgacgctgcgatcgccgtcggcgcctcgcgcagcgcaaacgacttggcgaggtgaccgaggtgaaggttcttgatgtgaaaaaagcgcttctcctcgagcgggtgagtcgagtacgaccggacgtacgactggaacgccttttgcgcgagcgacgtgtgctgcgcgtcgagcgaagaaggtcagtaacaagggagacgcggggtcaagattgagattgcgaacggagaccgaccttgaccgtgccgtgaacccagcgctcaagcgcgccctgaacctcggtcgcgcgctcctcccacttgccgccaccgaagccgcctttgaggacgccctccatgccgacgccgttgatcttgacggcacccatcttcccctcgacccagggcacccactccttctcactctcgccgacaaacgcccaggcctcaccgccggcaccgacacgggccgtccggccgatccggtggacgtactcggtcgagccgccctcggtcggcaggtcgtactggacgacggcccggacgagcggcatgtcgagaccacgcgaggcaaccgacgtgcagaagaggatggccgactcggtcgccgacttgtcagcaaacgccttgagcgaggccaaccgcgtctggagcgggagcgagccgtgcagccggtggagcgtcgtcttgggcaggaggaccgacgtcagcgaggtcggctcgtcgagaatcttgttgcgcggccgctttctcttgcccttcttgtcgcccttgcccgcctggggcttctcctcggcctcgtcgtcgtcatcatcggcagacgagtcggcctcttcgccgtcgccttcctcagcgtcctcgccgtcttcgccctcggcctcgccttccttggcgccgcccatgccgatgccgccgagcatcttccagtgaaagtcgaccgagtcggtcgtcgacaagaagacgataacctttttgggcttagcgtcggcggccgccctcttaggcgcggcaacgagcgagcgtagaagcgagacgagcgtgacgagtcggagcttgggtggggtgatgatgtacgactggcggagctgcgacggcggcgtaaacttctcctcctcgatgccctcgaggtcgcccaagtcggtcgccggctcgtcgccgtttgtcgagatggcggctgctggcgttgcggtcgccggagcggcgacggccttggccttgccgcgccgggcgagctcgtcgagcgagacgtcctcgcctccggtcgcacggaagagcctcggccggcggagggcctggccagcgagcgcctggacgtcctcccggacggtggccgaacagaggaccgtcttgcgctcgacgtcccaatcccagccgccgacggtgccggcgcggccgccctctccgagctcctggatcgcgtttttgcgccggccgtcgagcgacttcaggatcgacgcaagcgtctcggcgaagccgaggtccatgagcctgtcggcctcgtcgaggacgagccaccggagcttggcgacgtcgagcgatgtcgtgttctggaggtggtcgagcagccgaccgggcgtcgagacgaggatcggcaggccctttctgatgcgcgccttctcgtgcgtccgagtcgcaccgccggtcaggagacccgagacgagccagcgagtgtagcgtgcgccttccgtctcgcccggggcgacatagttgaggttgagtgagaggaggccctcgaggacgtcgtggatctgcttggcgagctctcgggtcgggacgaggatgatggcgagcgtgccgatcgaccggtcaatgtaagactgggtcgaaagcggcaggagcgactggaggatcggcaggaggtacgtaagcgtcttaccggaacccgtctgtgactggataaagatgtcgcgccggctctcgtcgagcgcctgggctgaagcgcccgccggtggcggcggcaggagcatcgtcggcagggccgagcgctggatcggcgtcggctggctgatggcgagcttggtcgcgaggtgatgcgctagcaagggcgagaggccgagcgacgagaagtcggagacggccgcgccgccggtcgggccggccgagggcgcgttcgagggcgcgatgagggatttcgaagtgctggccgacgactcgggcagggcgtctggcagcgcactgccagatgacccggtgtggtacgccttgtggtcgtgggtaaagaggctcgagatgatctgcttcttgggctgcgcgataccggccgccgctccggccgccgccatagggcccgacgatggctggatggccgcagccttgccctttgagcgcgaggcagccaagtcctcgtacgcgtcctcgtcaaactcctcgtccgcaaactcattcgggtcaaacttgggccgctttgacggcttgaggccgatcgagggcgcagaggtcgacggccgcttgctcgcgggcgcggccgccgtcgcaggtccggcaacgggcgcggcagccgccggctttggctttggtacgtaggccggcttctcgggcttcttcaagttcttgttggccttgaccctgcaaggcaatgaaaaggagagcgggagtcaggcctccgactagctcgggagagaaggagtcttcgcgacgcgcaggcaatacttaccggtctgtccaccggccgcccttgaccttctcgcctttactcttggtggctgagcccgagggcttactcggagctatgttgatgaagaggtcgtccatcgaaaagggaaaggacgtgaggggggaggagggacgggattgctgtgcgagccaggtgcatcgaagtgccttcgagcttggacgacgctcggcaggcgccgaatttcaagagctagggttacagcccatccgccggcggcagcagcagcaccagcgactgaggcccaccacagaccgaccactccgtttcgatctcccatcaccctcgagccagctttcccgcacaggtccgcacgccttttccagagccggccaaccggcccgcgcctggactcgatctgacccgagcgtttcgcggcctgtcctccactagctcgaccctccctagccggctccggaccacgctttcgcccagcgcgttgaccgacgcgcgccagcacattcgactgcagcagagacgtgcgccttgctcctgcctccctcgtcgcccgagagacgaagcctgacgttcccgcaccgccctccatcagcctctcagcttgaaaagaaaaggtcgccggccatgatcaccttcctgcacgctggtgcgtcctcatctctgccgccgccgatccgtcgcgtcccctccgctacgaagctgacccctaacgccgcccgcctactcactcgttgctgccagtctcctactttgccgccgtcgtcggcttcgtcttcgtgacactgtcgctaggtgcgtctctttgagcgagctcgagcctggagtccatcgtctctcgggcggctcaaagctgaccagggtcgacgcgtcttcgccctccatcccgccttacctgccttcagcgagcggcctgctttggattgccgaggtcatcgaagagcacacaaagctcgctaagaagatcggccgtcggtccatctatgtgcgtctcacctttcgatggcctgggctgcgtttgaaggcgaggcggcatcttggctgcgtaggctgatctcgaccctttgccttaccttcacccaggccgtcatcgtcttccatctcctctttctcgtgctcgacaagtttcccctctggaagatcgcgttcagcatcggctgccatctcatctaccttgtgagttcccttggctcgttgcgctcgccctgcctcgccgcctcgcaacgcgctgacgccgatccgaacgatctcccctcccagcgcaacttctcgtcatcctggccaatgatcaacctcacctcgccttccttcatcggctcgtgcgtcctcgtccttgccgaccacttcatctggttccggcacttctccgtcatcgccgcccgagcgcggacgccgatccgcgcgaccggcgcctcgccttacgcccggccgacgcacgcgagctacagcaacggcaacatttatcaccaaggcgttgccttcgtggacgtcgcgagcttctttggtgcgggctgcgttcccgtctgcttgctcggaatgccgccgttgcgaacccctgctaactgccgccgccgttccatccccgccaccagccatctgtgtctggtttatcccgctctacctctttctctcgctctcggccaacgacaacgccctgccgtcgttcggctccaatccggccgccgtctcgtccgcaccggccgccaagaagcagccgctgatcacgaccctcttcacctcggtcgccgctcgcctgccgcggtcgatcgtgccgaggcgggtgcgacagacgtttggcagccggcgagacgacggctcgggccttctcgccccgccgagcccaggacacgtgacgccgtctggctcgtcgctctttgcgccgagctcaggctacgagccctggggagggggcatctcgcccggggcgtacacgcctggcggctcgccgctcggcgcaatgggcacgccgctggccttccgcagtgcgatcccaagcaacgccaaccggacgcggctccagacgccgccaccacctcagcggcgagcgagcgggacagagtacggcagcgcggcgagtgcggccgggacgccgagcgggagcccgcgagggccgaccatcagccacggcctgccctcgctcgacgccccggcctctctgcccggtctccgcggctcccaaatcaggcggaagacgagcaatctcccgctcagcccaacggtcgacctcagcaagaaggatgactgagatgcgtcatgatcgtgcatgcagccagcgggcgagcgagtgagagcgttacatttgttgggacagctgtaggagggaaagcggggagaggaggagtgctacaaggaggaggccgatcagggcccggcgccgtgcgtccctcggctgccgtacccatcaaggagcggcgtctgaggcgtcatcggctgctgctcgcctgcctcctcgtcgacgtcaaatacggccgcatagcggacgatcgggaacttggacgactgcttggacgagaatggcaagcggaggaggccatgctgacgggtgggcgagcgcggcggacgcgagaggtggcgaagcgagcggtacgacaagccgatggccaggagcaggatgacgttcaggacgatgctggcgctaaggggtcgggtcgaatgggacccttatcaatttctggccgtttttcagagaaggtagagcggcaactgacccaaggaagaacgtcgagcgagcagatctgggctgtggctccgtgcgaccgcctgacgaggatggcgcctcttgagtgggaggccggtcgcctgaagcattgtcgttcgacggcgaagcgggtccgacccgcgcgacatccagacaagcgagtcgggtggtccagacaaacgagtggacgcccttgctggccgagacgaacgtcgggtccgagggctgccgagaaaaaagggtggagtcgattcagacaaagaaagagaccgcgacaggaagccagccaaacacacctctggtgctgacgggtcgcagattagacgaagcttaagctgctggcgccggttgacgtactcctctccgagcagaatgacctcgatgtcggctgaggggagcagggcggtgggaggcgcagcagaggtcagccgatggcctcctggccgagccttgctcgcacgagcagaaccacgcaccatattcgctgtcaaaacgaggcagaagctgggcagaagcgccctcgagcgaggaggcgatcgcagcaaccgacgtgatcctcgcaggctcggctcggtggttggggcgagaattgagggtcgtccggcagacgagtgttgagggcgggcactgccagacaagccgaggcgatcagcaggaggttctgccctagcacttacgggcagcaggactcacctgctcaaagtcgggcagcgtgccatcgtggccgatgccgccgcccgagacgcaggggccaaaggcgtaggtcgtctcgctgagcgacggcgggctgagttcagagtggccgaccgtgcgggcccgaccgagcaggccgccgaggtcaagcgtcgagccggcaagaggtaccgtacaggccgctgctcgggcgacttccagcccattcagggcgaggacgagcaggcaagcggcgtgagagatggtgctgggtcggggcatcggagaaagccgccgaggcggggacttcggagggaggacgctgagctcggctgggctgaatgaaagctgctgattgcgaggcaagatcgacgacgacgaccttggtcttgaggaaggacggtggcgagtaggagacgacgagcttacctcgcctcccagccagcctctctcttgacccccctcaatgggagaaggaggtaccgaggacgcgatctcggctcgactccggcccgggtgggttcaacccgggcttgcctcctcctcgcttccggccgcccagcttacgggcaccaagcacggccgggccacatgcggccaccgctcatcctctctattctctagctccttttgtcggccgatcaaccagccgagatctcgacgcgcctccccttgcctcccttgtcggacgtccgcctgaccgcacggggactattgacgtcccttggcccagcgactgacggcccgtagacggcccagagggggcgcagagggggcggtggggaagatgggccgggtatagacgacctcgtccgtccttaaaggtccgcgagcagggcgacgacgtgttcgaggtctcccatcatcaaccgcagcagagcttgtcccgtctctctctgcctcgctcccgctcgctcactccgctgcagcacacagcacccccccccccccccccccctcccccccccccgcccacctctttcgaatcgcatcgtaatgcagctcaaggccaggactcagggcatgaagcctcgggcagttgacggcctccagttcaagtggttcgtggacgtacctgtcttgcgcccgatcgaccacctctgatgttgactgcaatgcaccggctttgctcttcaggcttgccggctcgccgccacagaacaacacgcacacgactgagtttggcgcgccctgggcccagggcgaggtcttcaagtgcgttctgggtggcactctgccgttacccgcccgtactgaccgactttctccgccaggtcgacctcgttcgccctcaccgacgcgtctggcgccgaggtcccactccagtgctggccgctggcctactggccggacggctcgctcaagtggtccggtcattcggtcgccgcaggcaccggtctgagcgagacggcacgtctgcctcgagctttggtctaggtgtcgcatcgtgctgaccgcctccctctcctctgactcgacgcgcagcttacgctcgcccctggcacgccggccgagcacccgacgccggtgacggtcgagcaggcacccgagaagattacgatcaagtacgtcgtatctctgcgacgacacttttgtcgctgcccggctgaccgcccccgcctgccctcgccaggaccggcaccttctgcgctaagatctgcacgtcgggctcgacgctgattgactcaatgtcgatcgacggctcgaataaggcgtacggcggccagctcctcctccagtttcaggacgctccggacgactcgtccgccacgccgaaggtgaccaaggcgctcggcatgatcgagacggcgacggtcgagcagagcggacccatccgtgccgtcggtgcgtccttctctttcttctctcatttcgacagacgttgccactgactgctcttgcatctcccttcgccctccagtcaagctcaccggccggtaccatccgcaggactcgggccgggcgccttggctgccgttcacaatccgcttcatcgtcggcgctggcgggaccgaactccgccttgttcacgtccatactcatgatggcgacgacaacaaggacttcatcaagggcctcggcctcaccttcaaggtgccgatgaccgacaaggagctctggaaccggtccgcagtctttgctcgactgaccagaaccggcctcgagctgatggatcctgtctcctgatcgccaggcacgtccgtttcggtggctcggagggaggcctctttggcgagggcgtcgcctgcctgacgtgcgtaccctcgcggccgttctcgctcctcccgccgccctcgactgaccctgaagccttaccctctttgcagaggcctgcggcggcagatcggcgccgaggtcgacaaggcccaattcgagggctatgcaacgccggttagctcgacttggcccgacaatgtcacgccctacctcgacacattgccgacctggaacggtgcgtcttgtcaagaactccctgaagcaacgtccaagctgacctcgttgcttgtcgcctgcagacttcacgcttcgtcagctcggccccgatgccttcaacatttggaagcggatcgacgagaacggttgctggctcacccaggccggtcacggcaagcgcgcggctggtctcggctacgtcggcggcgcggccggcggcggcgtcgtcttcagccagcgcaacttttggcagatggcgccccggtcgcttgacattgcgaacgccggtagcgatgcggccgacgtcacgctttgggcttactcgcctgcgggcgtcgcgctcgaccagcgtcactactcgtgcgtccgctctgactcgtccttgtccctttaagccggctgaaatcttctcctccactacaggactgtcgaccacaagctcaacctccagtacgaggacaacccggatgtgcgtatgccactcgcgcttccttcgtcttccgctcgctgactgcgtcgccttgatcatcggcagccgtcggtcacgtccaccccctccggcacatctcggtcgtacgaggtgcgtcttccttcatatgaccgtctcctggtcgtcgaaggacgtccaagctgaccgccgtgcgcccccttgttgtcagatgtcgcttgtcgccgttgctacgacgccgacccgtaaggcactctccgacatgtccaagacggtctcggagccgccgatgctgctcgcgtcggccgagacgtacgccgcccatgggctctttggcggtcagtgggggcccacggttgccgactcggagctcgagaagaagcacgacaccctcctcgacttctacgtcgaggaggtcgagcagcggcagtggtacggcttcatcgactttgggtacgtgctcctgtcaaccgctttgcagcatgtctatcatctactgacgagcttcttcgctccattagagacgtgatgcacacgtacgacagcatccggcacaactggcggtacgacgtcggcggctacgcttgggacaacgccgagcttggcaccgacctctggctctggttcgcggccatgcgctccggccggtccgacatcttctggctcgcttaccacatgacgcgccacgtctctgagtctgactgcttccactctggcgagttcgccggcctcggctcgcgacacaacgtttcccattggggggatggtgccaaggaagcgcgagtatccagtgcaatgaatcggcgtccgatgtactacatcaccggtggcgacgagacgctcggcgagctggcccgctatgccctccagacggaccagacgatcatcaagtgggaggccctccgcaacattttgcctaagccgaaggctccaacgcgagtgcgcatcgggcctgactggttggcgctcgtgggcaactggctgttcgaattcgagcggaccggcgacgcgcactacaaggacctgattgaaaccggcatgcgcgacatcggcaacttcaagtacggcctcttcaccggctactcatcggccgtcggctttgaccccaacaccggccatctgtatgaggaggaggagacgtcgccgagcttcaaggagtcgtaccatcgtcagtgccaaccttgctcgttcgcgacgagggccatttgctgaccctgccccttgcgctcggcctcagtgaccatgctctttggcggcggcgagcttctgatggagattgtcgagctgttcgacgtcccgtcgtttgacgcggcctggcttgacttctgctttctcttttctggcaccgacgccgagaagacggcccgctacggcctgacgttcaagtcgggcggcttcacccagctctacgctaagctcctcgcctacgccggccttcggcgtcaggaccagtcgctcatcgatcgggcctgggacacgttcaacaagaacaagacgggcgtttggccggcggccgtcaccgtcggcgggtccgacgtacgttctagctctcgtactctctactcgtcaccgccagcgctgaccgaccctcctctttgcagcacatcgagcccgtccaggagatcttcggcttcgcgaccaacgacgccgccgccctgtcgctcaccctcttcagtatgtccttcggcgcagcctcctgctcgaccaaagctgatctctcgcccgcctccctcccttcttcagcgctgctcaagatctacccggccggcgagcccaaggcggcggccatcgctgccaccgcctacgacggcgcctcgatcacctcggtcgactcggacgagagcgcgagcaccgtcgtcggcgtctacgcggccaaggcccggagcacccgctccaaggacgagggctcggtccgtgctgtccgtgacggcggcgagcagaagaagaaggcgggcggcctgcgccgcttcttcgcttgcggctcgggcttcaacctcgactgagtcgcgaacgccactcgcccccgcttctgtctctcctttctttccttcacgccccgcccagcccgtcatgcccgtcgtcgtcttcctccgtcgtctgcccgccttaccagcagcctctctgtctccgccgtgctcctttgtacctcttcacgcccttgcctcttttccctgcctgccagcgccttgcccggccgcccttgtacatgctgctcttccctcccgacccaatgtctcgcgccccgacggaatgggcccgggcagcatcgtgtgcggggggcgtcgataatatttggtgccggcggtcgggcgcgctcctgccgcgtgcgccgcgctcggccgaccgtgtgcgagatgtcgcagctcgtcctgttccaaacctcgtcgccaccggtccccgacctaaccgtgtcgcaacagagaaaggagagcgccttctcgctcgacgacgaccccaagaacagctttgctcctccatcttctcccccgttcgcaggcaggacgatgatggcacccacagatgacgacgagactgcccgccggccggccgctgccgtcagctcgactggcccacaaccctcgccggcgctcgcccgacctccggcagcggcctttacgcttctccccctcggcaccggtggcgggccgttcgagaccgacctgtcggcctacctgctcaagccggcgagctcgccctggtcaagcggatgcatcagtctcgaggctgggtccggtatcggcgccctcgccgagctcctcggcaagcctggcggccaggccctctgggagcagtttgagctcggcgacgccggcaacaagggggaggcctggatggcgggcaaggtcatggagacgatgcgggcgtacctcatcacgcatgcgtacgttctccgtgttgacggtcttgcgagggctggtttggccggctcgacgctggctcccacacgtcggccggctcgcttccgcctgatgctctgacgacacgactgacgagcttcactgcatcctccccttcgtcagccacctcgaccacactgcttcgctcattcttggctcgggcggtctccctccgccagcgccgcccgtccagccccgaacggcgacctcggccgagccagtctgggtcaacacgagggccctctacggctcgctcgagacgctcgtcaacctccagagcgcgttcgaggagcgcatctggccgtcaatagcaggcttcgaagcagcacacgggacacggatcgtccgcttcctcgagattccgcccccgacgccagccgagcttgcggctccggtggcgccggtgtttccgcccgccgcctcccgcattgccgcgccgacgccggcaggccggacgctgaggtcgcacaagccggcgtcgtcgcccacttactcggcaaactcttcagtgacgcagccgtcgcctccgctcgcccacagggcgccacagtcgctccctgccttgcctccagcagcctcgtcgtcgctgctgccgcctcacgtccaggctcaggcctacacggcgctgccgacctcgcctccgatctcggtccttgcctttccgatttcgcacggaaattgctccgccgctcgccgggacagcctacgggtcgaggcctgctgcggagtggctgttaacaattctgttgaggccgcagggggctcaaagcgcaagcgcagcggccaagtcgacgccaaggggaaaggccgggcgacggacgaagaggtcgaggccgactcgctgacggcgtaccaggcgagcgccttttttgtccggcttgacgaggtcgacccaaaggaggctggcgcgacgcgacggcgcgagttctgcttcttcggtggtcagctccagacccagctcgacgagcgaaagaccctgatgctgacctacttgccttttgcacagatgtcgagcctgactcgctgtcgtccgatcctcgcaacaagagagtctgggaggaggttgcctgccgctttcgagcgggcgtactcgactcggtctttgtgagcctgccctctgcagcgcgcccgttttcttgatcgaggctgacaaaagctcgcttttgttacttcagatggagtgctcctacgacaactctcggccggacgagctcctctatggccacctctgtccgcgccacattctcgcagagctcgctgtcttgcacgagcttctcgggccgacggggtcgatacccggcggtctggcaggcgggacctcctcagacgagccgctgtctgcgcgactgcgcgggttcaaggttcacatcatccacgtcaaggagactctcgagtcgcttgcggccgacgagggagggatccacggtcgggtcttgcgcgagctcacagagggtcagcagtcgttcgagcacggcatcctgtccgaggtcgagttcaaattggtcaagcgcggcgagctgctcggtgcgtgcgatctttgaggcagaagcgtccgaggactggcgctgactcgtgtacctttccctcctcagccctctgagacgaccggccgatcgcccgccaacctttcgtctctcactcattcttttctgtcctgcttcctctttcaaatctgccctcagcgagggcgactaccctctgggccaatctcggccgtctgcgtccttcctatccacgcttgcctcctgcaggggggcgcttgtaccaaaagtcatgtctcgccgcttactgctgtcagacgcactgcgattccgagcatcggaagccatgaaatcggaagaacggccggtcagagccgggccgactggaacgggttgtggccaccgacgtagcgcggctggtcgcctcgtgtcgaagcaggcgatgaggacggagcgaaccggatctcctgctcacttcggccaccctcgctgcgtgcgtcggcgagccaatagtgcgaacggatgacggccggcgagtcaaagctggtgcctgagtcggccgcgggcgagtcgatgcggaccgcaaggccgagtactggtggcctcgcccgcgcaggctcgtcgtcgaggtcttcgtcggaaaactcgccctcgacgaagcgtgatggcgcccgcgaggccagcaagggcgttcgcggcggaccgagcgcgacagggtggtgccgggcggtcgagtactcggtctggaagtcggggaagggctcctcttcgaggtcgatcgaccggcgacgcgacgacggccgcgagtcggtcggcgcgagtgacgcttgagagcggaagtgggacggccgagggcaagcggccggtgcgggagaggcaagatttgggatggagaagagggagtctcgggagaagggatcgcgctgcgagtgggcgaccgactcgtacgaaggcgagggcgtcggcgagtcgatcgtatagcggctctgcggccgagtccaccgccggtcggtgtcgtcgtcgtcttcgtcggggagcgagcgcagacggcgcttgtccgactgacgcaggaagccggcaaggtcgtcgtcgatcgcggtgggcgtgtagggtggcggctggcggcggacgttacggctgccttccagcccgtacgcgcgctcgtcgtcctcctttgtctgccagccggcggccagcttgagcggcttcagaccccgctggcgggcgcggacgcgcttaacgtcgttccgagtcttcaatcgccgcccgaggtcgtcgcgagtccgacccatgaaggccagcacgccgtcgacgccggtgtggcctaacgtcgactgggttgtcttgcggacttggatgtcgtccatgccggccgcccagcgctcggacgcctcgcgcgtctttctgcgctcgtgtcggacaaagaggagcgcgccgacgatggcgaagacgatgaggagcgggatgaggatcgtcaagacgtggatgaccggcgtcgattcaaccgacttggtgaggaagtggtcgaggcagaccgagaggtagggaacgaagccgccagggcaggaggacggcgcgcaggtgctcgaagacactgtagcatcggccgaggcgcatgaaaggcactcgttcgccgaagggccggtgcagctcgagcacgacttgtcgcacgagctgcaggacccggacgccgcgtcgaagaattgcgacttatcgcagaccggcaggcatcggccgtttgacaggacgggccgcgaggcggggcagctcaggcattggtcgaaggactgcggcggccggtggcagtgtcaaggaggagatcgagctgtgcgaggcaaagttgtggaggacgtaccggtccactgcaggtcgcacagtcgccatggcaggtcgcgcacgtgccgttgccgacaaaggtcgacgcggcgcaggtcgaaacgcatgagccgctcatcgtgagctggcccgacgggcaggcggtgcagtaggacgcgtagccctcgcaagaggcgcagctagagctgcaggctagcagcgccggcgagaaatggttagctcgtggtcattcgcgaagggcaagggttgacgaccgccagggtcgtaccgtgacagacgcgagagtcgccgtctcggaagctgccgagcgggcaagtttcgacgcagacgccctcgagcgtgagcaagtggccgtcgaggcatgcggtggccttgatttccgagcgggacgaatcgagcgcgacgcagccggtcgacttggtgggacaagctgtgcgtagtatggcatgatcgtcagtcttgcaggccgaagaccggtgatctcggccaagacatacaatcgcacgcgccgatcgccggattgagccagaagccttgcgaagcgccgaagccggcgctcgcctggtcgcatgtcttcctggccgagtcgacgtcgacgcagcgtccttgaagcaggcccttgccggccgagcagttgaggcagtcggcgctcgatgggccaaagcactttccgccgcaagttggcgagcacctgccgatgtgtttctggtgtcagcgaaagcgttttgagggcacgaggcgagagggacgcacggcgagcaatagaaggatgccaagtcccaaaagttggcgcccgagcactcgctgcccttcccgctcggcccattgctcggcacacagctcccaagctcgacctcaaagcccttgacgcacgccgtcgccgtccggtcgctcgagcaggcagtcgcgtacggcccgcaggcgatgcactcgccgtcgagcagagtgaagccgctcgcacagatcgagcactgcaggtggtttgaaagcgtcgcgtacgtcggatgattggcggtcaggctcggtgacgcccagccggccgagcaggtgcaggctgaggaggcagtcgagccagtgcattggccattgaggcaggagcaggctggaagagagaggtaggcagaatcagctcgagttgcatagtatagcttgaagggcggacgcactcgtcgtcgagttgaccagaggcgttgcggcgcattggccgttgccttggagaccatcgctgcactttctggtctcgcagtggctggcgcagtctggcgcataaaatttgagcacgagtcagaggagaccacagtgaggctctcgacggacgacgcaccgaggcattcgggtccccagtgtcccggtgcgcactgctcgcaggccaggccagagaagccgggcgagcagacgcacgttccgttccggccgaggacgtcgttcgagacgcaggcgccaccggcagcacaaggtgtagcgcaggcggctggaaaggcgacaaaatacgcgatcagcgctgaacgaataggggagcaggagataggcggcagacttaccgctctgggcgtccagcaccttgaagaccttcttgcggccgatgccgagcggcccatcctcgaggtcggccaagctcgaccagacgacatactcgccgccaccgacgacgcccaacttgagccagctggccgggctgagaatgacgctctgcgccttgaaggtcgcgttgtcggccgctcgtcgaccttgcgcgaacccctcgccttggccgccagaccaaaagacgccgtcgtagagcatcgcgccctgtagcgagggcacgaggtagaacgggctcgcactgctcgagagcgtaaagttgtcgaatggctggaggccggcgagcggggccgaggtcgacgtgttggcctggagggcgggcgggagcgggtgggcgtacgtccctgggaggaggaggtaggagccattggacgaggcgccaccgatctgagggaggctcgagagtggcaacggaatgttgaggcaggagaagggggagcacacggtcgttgtcatcgctgcagaagctggagggagtaccagacgcgtcggcgaccgcagggacgcgtcagcttaggctagcgagctgagagtgagcaggcagagtcgagcacgcacctgtttgaacgagagcagctgacagcgtgaggcagaggaggctaaggggaagcatgctagaggggcgcaggagggaggagcagggcgaggcggaggcgggcgagttgagctgaggtggtcgtcagagggcagcagctggagcccggccggcgtcgcccttcatgaggcgacctctcgatggggtgaccgaggtagctcgcccattgtgcgcttgcgctgaagacaaagggaaggcaaatgaaagggatggtagtagggagggcggcggcggcggcggaatgcggaggcccgcggtccttttgtctggccggccgctcttgtctgagaaaaggggcagaccgtttcagcctcactctcgcagccgaccgaccagtcgccagagaacggactcaaaaagctactcacaacgtacgtccgacatgctagatccgcatctcggtcgctgtcgcgtcctctgcatgtttctccctcctcgcgcgctcccgactcttactccgttctttcctccccccgcctccgcccacgccttctttcccagctccgttcgcagctacggtcgaactcccactagcctgccgccagcgctgcccgagccggcctctccggccgtgcgagcccgcatcagcggccgaggctggaggcgcaaggtcgtcccgcggcgtcgggggctcgacgaacgagaggtcggtcggcctgcggcgaggtgctggggggaaggtaaaagggcccgagacggtgctgcgccgcgcacggggcaaaggcaaggggagcgtcagcgtgcgcgagctctcgaggggacttgcaagggctccagcgacgcgcctcgggaacgggttaaagagggcctcgatgatcgcctcggtccccgtcggcaggatgaaaccctgccgcgtcctgggctcgttgacgtcgactctcgcaagcgatggccccgcactcggatcgtccgtcctcaaccggccgccagacgtctgcgcccccccatgcccatgattcctgccgcctccgccgtcgccgccgccgtcgttccctcccgcgccgcccgccgtcgcgaggcccgtcgtcgagttgtttgtcgagctcgggcccgagaccgatccgcccgaggggagcgcgcttgagccgacggtcgagccgttaacgagcgtctcgagtccgccgtttgcgagctggcctttcgagatgggcggtctgtggggacgccaggggagtggcggtagcttggggttcagctggctgcattattgagatgagagatgaggctgccgactcacgcagtccaatggcgctggccgccaatctgcgtcagctcaattttgagctgccgacgaaaaggagtcgcgaagtgtcagtcggctccaagggaagggcagtcgagcggaggcgcaggcgcaccttgagcgtcgcattcgtcttgcccgagtcgagcaggtagcgccggacgacggggccacggccggcgtactctgcgaggttgagcgtcagctggccgagccggaggatgcggtccgaatcctcgggcgagtggtactgccatcggcggccgcagcggcagtcagtctcaggacgaggtgctgcgcttcgcgcaagctgggcgggaagacgggggggggggggaacgcacctggtagaccgacaagtagagctccctctcgcccagcatcgccaccttgtcatcgtcccctccggccccggagccattctcgactgggatccgcacgttcgcgacgaccgtctgctcccagcggcaggcatggtccgcaatgtcgacgactgccgtctcgcctctggccttcgtgctgacctcgctttcgtccggccgggcataggcgcggagaacgtcagacttgtgcggcctgtgtgagcgctttgcgttgctttttgtcgatgggcggtgggagggcgccgttgggaggtgctcactcgaagaggaggacgaggaggagcgcgacgaggtggatgtcgagcgcgagagtgtcgtcgagcgcgagagcataggccggagggaggagctcgacttgcgacgactggagctggtgccgtctgtgtcccggtcagagcgcatcagagtcgtcagcgagtcgtgagatcgagaggaggtcgtgcgtcgcctgagcaggagggagtacgcgtcgtacgccctccctcccttcttgctccagcagcacgaggccgatcagagacgacgaacctcccacagccccactctcccgacccttgcccttctcagccgccctcgcaccagagccaccaccatcaggcgcgccgctcgtcggcttgaggctggccttggtcttgcgaaagcgccactccgtcccgaacgcgccggcgacgagcgggacgttggcgaggtccttgatctcgagccggagctcaaacagggcgttgcgcgagggcaggaggttggagaagaggcccatcaggttgttgctggccgtactactgctgctctagcgagtgctggggtcgttgcttgatgctgtcggtcgtggccgttggcgggaccgaacgctcgtcgtcccctgacgtcctgcctagcccttccgacggccatcagcaatccctccctgcttcactttcgcaagaatgtgtgagtctctttcttagctaggtcctccatatctccagcagaacatcaactgacgatgctcctccacgtcggccagctgacgaatcggtcgccaagctctgggcgctcgtcggcgagctctcggaccagctcacccagaaccgggcggtgacggcccggcttcagagccagatggcggagatcaaggtcggtccttggagcgccctgattctcgcgccgcgagctggacgaagcgagtgtggtatggctgctaagagggagaggtggccagcgggtcgtgctgtcattatgagagcagaggcgatgaggccggacgaacgtcgtccgaccactctccctcgcccgccttgctgacgctctctctcgctctcgcggtcgcaattcctgttcacgctcatactaggagcaagccgtccacactcatgctggtttcccactccggcggttcaataccgacctctcgcagggtgcggctcgcttcatcaaccttcgctcacctcctcaccaattgacccgccctcgcccctctctcgccttctgcacccgcgtccgctcgcccgctcttagaggagtatcaaagcgcgatcgaagagtttgcggccaagctcgtgctcgagaaccggacggtgacgcacgagaacaagcagctgagcttgctgctccgcgagtacgaggcgacgctcgagggcgtcatgggcaagtttcggagcttggctgtctgtccctccccggcccctctcctcctcctcccttccctgtgctcgcccgcaagcgcaacaggaaactgacgagcgaacctcttttgggcggccggagcaagcacgccaacgcgacgcacgagctcgccctgcacgagcactacacccaggccctgacggccgtcgcgcatgcccagggccaggcgtcgctcgccgagagcaccgcgatcaatgctgggctcggccgggtcggagggctgttgcgcaaggcgctaaggagcgagatgggtgaggagatcggagaggaggggggaaggtacgtcgaccgatcggttttgcgtctcttgggtcgtcgaaagggggtcggaggaggggggactgacgggtctgcgctgcaatctttgacacaggaccgcatccgatatttcatcccagggaggttatctccccccgccggcgtatacacccctcgccaccctcccaatcggctcctcctcgacctcgcccgcgccgaccaagtcgtccttcctctcggcctttaagaagaacaagtcagccggcactttccagatctcgtacacgattgccacgccgcgctcggccaacgcaaaggtgctcgagcgcgggttgccgaccgtcatcttcctccatgccgtctatctttcgcaggcaatgttccacggtcagtcgcagcgcttgggcaaagcagccgaggccgagctttctgacccctcctccttttacctttcgcagcccagttctcggaccccagcctccggcgcttcaacctcgtcagcgtcgacctccgcggccatgggcacactctctcgccactggctgcgatccccgaggactactcgctcgcgacggccgcagacgacgtttttcacctcatggtctgtctccttcctcgaggcacacgcacccaaccgtccgctgactcgacctcttgtcgcgtcgtgctgcaggacacgcttggcctcgagcaggcgtacgtcgtgggatcctcgatgggggcgactgtcggtttctccatggcaacgctcgcgcctgagcgcgtcctcggcgtctttgcgctgtcgcccttgctccaggtcgaggtgcgctgccgctcccttcccgcacttgtcgctctcacctgacccccttttgcttctctctcaccgttccgctcagcccgtcgaggtcctcgagggccgcgaggagatcggtgtctactggagggagggcgtctccaacaacgacacgcaggccctgctggacgctgcccggggcgcgattgagttgctgttcggcgaaaggccttctaacgacgtcgcgcgcatcatcggcgtcgcgctgccgcttgcgatccgcaactgggccgagacgggccagcagggagtgagtcgcgttgctccctctttctccaagagagtccctctattaaccctcctcgtcgctcgtgttcagtccgagatccaccggcgcgtgacgatccaccccttcacgcgccgcaagccgctgaccaaggccgagcttgcacggatccgcgcgcccgtcgtcgtcatccactcgggcgaggacgcggtcaccccgctcgagggaagcgaggggctcgtccgcgagatgcgcgaggcaggagtcggtggggcgcggggcgtccagctcaaaatcatccctcgggcggctcacgtacgtccatctgtatcgctcgcggccgtgcctacttttgctcggcgctgacacatctttgctcgcctgtgcgtcaggtggctaactcgacgcacgcctcggcggttaacagcctactctccgactttctcctcgccaacctcccgcaaggcgtgcctgttccgcctgcgccgatcggcctcggcgcccagcagagcccctggtacgcggacctctaccgcgaccagccgacggacgacgatgacgacgactactaggtgggctcgacccacgcacatagcgacgattctgcctctacgtacctagcgatgccctctttgtccctctccctacctctctctctctctgtctccggttcttctggttgcctgtctttctgtttgtagttccaggatgctatgcagggcttttcccctctggattcaacggccgcgcagagatgcaaagtgacatagcagatcggccgtacgaaagcgctcaaagccgcgccttctcgctttccctcgcccaccgcccggcggcacgtagggagcggatcttttgaacgcagacttggccgagaaggccgacgacctcgcggctgcccgtttcgctagcaacggccgagctggcttggccgaggacgacgcgagcctggatgccctgagcgatgatggcgagctacaacaccgaccatctagtcagcgctggcgagagagcaagcagagagagggcgagaaggtggacgcacgcggtagaggatccagacctcgatccattccatcgcctgcgcgagctcggctcgcttcgtctgcaagtcggcggcagacgcgtctggaaacatagacgcaagccagagatcaagcagctcgtctcgcgagggcagcgagtgctcacgctgcgtcttggcgtcggccagcggaatgaggaggttgcggcgcactgcagaggcggcttgggtcaacctcttgctgcacccgcggatgagtgacggtcgactcactcggctcggcgacgtcggcgctagacagcgaccaagggagcagcatgtttccgagatcgcccagtgggctgcctgcatggcgcgcactcccggcggtcagcatgcagcagtgcaagcccagaacagcaggccggggatgcaccgattgcacacagctcccagtcgaggaggcctaccacttcgggcccgtcgtctgcgtagatcatgttgtcgagcttggcgtcgccccagactgcgcaggccgagagatgactgtcagctcagcctgaagtgccggcagagaaggaacgaacataccgatggcctttcgtccgccttcccaccggtcgacgacctgcgcgccatctttgaggaacgagagcacctcctcgcgctcgctggcatcgcgcacgatctctccgacgttcttgatcgcagcctgtgcgccagaaacgcggagcaaggtgccgacctgtcgggcaaagaagggcgtcgacgacggtggaaagagtgccggagttaggatcgaaggtgggatcgaagcgagccgaccgagcgagcgcatggcagcctcccagctgcgcgtgacagcagacaggtcagcgtccttgtccgacagaggctgaagatgacgagggatgcgatctggactgactaggctcgccgcgctgacggctcgacggcaggcagcaggaccgacgtgaagatgcggcctgtcggcggtaaaggcgaactctgtggtcagctctgcagccatcaagcgcaggtccgaaggcccactgaccctgcaggaactccatcaggtagaagacggagccgaagacggtctcgtcctcgcagagggcaaagaccttgggcaccttgacagcctcgtggccggtcctcgcctggtgctcgccgatggcccggagcagaccaaactcgcggtcgacacgatgggctgtccggtcgaggatcttgccctttggcttggctcgtaggacaaccgtctggacagaggcgtcttctaagctcgacgccgccgaggaagggccggtcgacaaggacgcggccgaggtcgagctgggctgagccgagctcccggaggctgccgacgtcaggcagtacgtcgggtttgactggccggtatcaaacttcttgaccgtcgtcggattcctccagcctggaaggacggtcgtcaggtaggcgaagagcgagttgggcaaggccgacggaggcgagggggtggtggacgagctaggcatctcgagcggattggcgggtgggcggaggcgggcagcttctcggctgatggctcggcttgaggctactttctaggggattggggagacgacagctgatgtagtggagtgcctgttcgctgtcgggtcgtaggcgacgatggagatgagggctcgtcgtcggagggagacgcctcggctgctcggctgcggatattcgtttgccgggccgagccgggacgtactctcctgcccgtcgttacatcgagagcacacacataccgagcgccatcgatagactgccttctgcatcaggcaccgtccagccagacctcttcccgacagattgggcagcagcgcgactcgcggaaccacgcgcgggcgcatttgacgtggccgaggtggcaggcgccgccgacctcatcctcccccgatgggtcatcatcgccgccttcatcgaccgagagtagctggccgtcggctgaccgtcgaggaacgcccgtcacctcgtcgccggcgcgaaagacgcccatgcagccgtactggcagcggtcgacccttcggacgccgagcgctgggcacgagagcttcaccttggtcttgccggtcgacttggcgacccggcgtgagacctcgacgacgacgtcctttggcaagatgtcggccgatgcaaactgggccgacgtcagcccaggcgagtgagccggtccgaggaaggacgagatggcactcgcagcctcgtactgccttgagccttcaagaccccagacgaggagatctagagggacgggtgagtcaatctcgtcagtccgccgccagccagaggagaagccagctcataatcgactcaccgaggtcggtatactcgaagacgggctgcacctcggctcgcggcagaccatcggctgatgcagccggctgagcgacgctgacggggaacgccagctcagaaggcggagcgggagcggcaactgccggaaccgtcagagtcgcgaccggcggcctaggttcgggaggcgcagagaccgaagattgcggtctcggtgggcggggcgatgctgcaatggagacggccactgtctgaggcagagcgggaggcgctatcggcactggcgccgcaatacgcggtgcagagggcgtcggcggaggacgagccgccatcgaaggtgaaggcacgattggagggtgagggggcggccgcctcggccctctcggcctgggccgatcggaggcatcgactcccggagcagcagacgaccggacgattgtttcaagccgctcctgttgaagttgccgccggtgagcaactcggacactctcgactcgattgagccggcgcgtgcgttcctcctcctctaaggctcgaccacgaagggtcggcgccagcgtgatctcggacccgccgccggacgaggcgatcgagacggtcgagagcgaacgcggatacatgggcggccggagagacaccgcctcgtcctcgtcagatgacgaagcctcctcgacggttgacgcagcgatgagagcggcgagaccgggagacatcggccggtttgcctcagcgtcgggcggagcgtggatcgagtgttgcgacgtgcattgccacggtcgagcaggcaacggcgggggcacctctgcagagtgagacccgcgacgggccgagggcggcggtggcggaggagcaggagcaggagaaggaggaggacgaggaggaggagggggagggatgggccggcgtggcagaggtggcggcggtggcggtggtcgacgtacagcgttgagcagaagcgacatcgtcgagggttgatcgcgaagagacgagagcgaagagagttccgtcgttgaggaggcggcacgatacgcgtcagatgagggtccaagaggtacagtaggcgttgcaagggagacagttgcaggatcggagcgattcctgaggcggaacggcttgggcggcggaggcggagaagtaggtcgagcgcgtcgcattggctggccttccgacgggctgggtcgagccagcgggagtctcgtctttgcatcctgcccgggctcaggcgtgcgcgacgacgaagaagacgacgaagagccggacgaaaaaccggcttcggcactgtccgagtcggagtcgacctgcggcgtcggaggaggcgaaaggggcggcggcgtgactcgacggggaggcggcgtcggcgcacgagctacaaagagacgagggctggaaaccggagcgatgggcggctgcgtcaacggaggcggtgctgtcggcacaggcgaaagcctccaggttgccgggttgcgaagaatggccgaggacgatgtcctaaacacagagggcaggagactcagcgaagccgtgcgcttagggagatgaacggagcgctcacggtctggcgctcggtgacggatgctggctatctgagttgtgcgacgagccggccggccgctcgacggtcggactcgaagggctccggagcgacctgccggcgccagggaagcgtcctgccgttgatggcggtcgaccgggcacctcgaccctcacaggcgtgcggaccggccgggggatccgagacgggttggcctgggcagcgtcggccggcggctgtccttgtgtccgaggaagcgcctcgacaccggtgctggcagcctcaggcagcgaggcagcgttaccacctggcggcctagggtcaggtctcgccctgacaggcggcgcggcgtcagcgacgcgtgccgcgaacgagctcaatccgggcactggtggaggggcagtcgcagcagcgatggcaggagcggtcggttcggacggcccggttggcgctgaccgcagccggtccgcttcgtcctcatcgtcgcggatgaggacgccggcttggaaagccctcatgcgcaccacccgctcgtcgaggccgacgccgcgagccgaccacaggtcccagagccgctgctgctcggtcggcggcgattcgtcgtcgtcatctccaaggctcgcacccgaaggcgcggcctcaagtaggcaaggtaaggagacgacggaaaagactggtggcggactacgcggagctggcgtgggttgcggcggttgactggatgcctcgttcgagaaagaggacgcagcagtgggtggctgatagcctggcggtggcgcctcatccggcgaagggttcggcggcgacattggccgcgcaggcgggggttcgccggccggccggtggaccgggatcgtcagggaatacgcatagctcggcggcggcagggctggcgtcagatccgagtcgtccgcggcattcatctctgcgacggcgacggccagtagtcgtcattagccttctgagcacaagcgtgagcgacagcaaaagcgtaccttcctggacgttgcgacggcgcatcgatgcccctcgcgacagcaggtcgccggtctggtggcgcgaccgctgcgagcgagagattgacatgctcggcgcccggacacggccagatggagcccgccgctgcgttgggcccgctgccgccgatgccgagggctcctcaaagagcgcaggcagcgagccattcctcggcaggtcgacagcagctggcgggagtaccgtcggcggcggtggcgggcgcggcgatggggtcgctgcggccgaggtcgatggcgggggagccggcggcctgctcgggccggcagctgggcttgccgctcgcctgccggtcgaaggccgactgctaggctcgccctgagtatctcctgctgccagccggcgcttcttcttgcgctttgggactggagcagccgcggacgagctgctcgcagtggcatcatcgcccgtcgtcccgcggctgcgggcgaggttgtcgggcggccggagcgtccactggccgttccagcgctggtcgttcgacagccactgctcggccctggacgagtcggctcggagacctcgcgaattgcgtggcgccggtgtaggaggcgccgggagggtcgggaggccagggtagggcaaggggctgggcggcggcggcggcatcgtccgcaggcccaggcgatgacgacgggcggagggagggacaagctggctccggaccccctgccgaagacttgtcgaccttccagatgcaaaggttccagaggcggggcttacaggcgctgaggagagggtccaacgataggccctgcttgagagatgtaggaagactggagggttcgggtcggtcggggaagatggaggtcgagggcgaggtcgtccggcgcaagaggttgggagcttgcctctgcctgccgacggcgacgcctgcaacccgcatgtccaagctgttcaaggccaaggaggcctcgccggcagcaggatcggcggccgtcctcccagcggtgcctgtccccggccaggcctaccggtacacgcaggagattgctcaaatggtacggcttgccgtcttgctctttggctcggcttgctcctcctcgttccccacctcgtccggctggctgacagccgcctccatgcacctcgcggacagatgtttgtcgctggcgagatccaggatccgctcggcgagacagtccgctacatcgaagacgtcgtccggggccaagtcattgaactcgtgaggcccgcttgtcttgcccggcccggcccgcagcgcgcacctcgagggtgctgacccttgtccttcactcgaccgcaggccattcgagcccgcctactcgcccaccggagagcgagccggaatctcgcgcccgaggacctcattttcctcatccgcgatgaccgagccaaggtcaaccgcctgcggacgtacctctcgtggaaggacgttcggaagaacgccaaggacactgacgggcccggaggcagcagcggcggacctggcggcggaaacgggccaggcggagggccaggcggggaggacgacgccggagagggcgaaggtcggtctctctctctctctgcgctcgacctggcggccatcagcacgctgactgcctggcgcccccgacctgttccagacaagctcgcgaccaagtcgcgtcggcaggttattaagctgccctgggaggtcacgacctactattcgaacttccttgccggtcatgcggccaagcggcgacgactggcgagcgcgacgggtgcgcccgtccaggacgatgacgatgccgacgacgaggacgaggacgacatggaagccaacgaggatctcctgaagcgtctccgagtaggtcgcgttctaccctgcatgacttgacaggccgtctgctgaccgacgcacctgtaggacgccgacatcttgacgcgcgacatgacgcgcgaagagtatgcccactactcggaatgccgccaggcgagcttcactttcaagaaagggaagcgtttccgcgaattcatcaacttttcggcctacctcgacgccaagccgaacgacgagatcattgtgcgttccagctctggctctctgtgggcaggcccgatctgatatttgctgcctcccgcaggacattttcggcttcctgtgctacgagatggtccacacgctgacgacggcggcgctcgccctccgcgcgtcgctctcgtcctcgtcctccctgagttcgacggcggacgagaccttgtcgccaaagaagcggactcggaccgagtcgtcgcccgagctggccatctgctcgctcttccagccgccggccgaggcgcgcgcgcccctcagcaaggacctcgtcaaggaagcctttgcgcgcatcgtccgggccaagatggaggagggctcgcgtggcctcggagcttggcgagccgacagaggcggcgtcctcggcggaaagagccggctcccgctgctgtgaggctctctgtacaaatctgaaacgaaatcttatgaccctctctttcgcgcgagacgagaggaattgggcctgagcggttagggtagcatcgaatcttcgggacggcggcagaggagtagagtaggtgggatcgggctgatgtgagacttgcttcaggctgtaaacgcggcggcgggcgcagatggcgctgggcaagggcagaccttgtccgtcggcgagcagtcgcgaaggtcgggcgagggcgtcaggtggcgcagagtggtgccctcatcgtctccctccgagtaggcagagtcgtccgaggaagcagcgtcggctgctggcacctgggtgaccgcgagggcagttggcggccgcgagtcgagcacagggaacgactcggccaacccggcgtggtctgcgtgctcgtcttggcgctcagcaccggctgccgcagacgatgttgccaggccgttctccgtcgagctgcgagcgtgataggctgtcatcgactcgagcgcaatgtcgagctgcgggcgtggcaaccgcgtagttcagcaaaggcaacaagaggcgcgacggcctgaacgacccaccttggactggatcgctgccatcctttcctccacgacggtcgaccgggtagagatcgtcgcatcaagtacactgagcgcatcggtcttggcaggcgaccggccgacggtcgccgagaaacgcttcgagccgccgcctgacgtcggcgaggcgccgttgactagctggtcggcgagcgctctgcgggcgagcagagagccctgccgggacacgggaggcgacgagctcgacggcgacttccggccgactgacagggttgtggtgctgcccgcacgcgagacagcgactgacgagccaaaatcgacactgaggcggtccagagcgctgtcgagctgcgagtcgaggttggcgaccatcgtgtcatgatcgagctcaatacgctggtgtagccatttattagccggtcagcactgcgggtcacattcgtccacccgagagactcgagggacggaccttgacctttgccgccatctcggccatctccgcgagggcttcgagacgtgcctcctcggtcgcctcgagctctgcggaaacaaaaacgtcagcgcaggtccatcagtagtctgctagagcaagcaggacccgcaggcttgacatccacgcactctgctgcagcgcgagctgctcctttttgtggtctccgagctgagaggaaagccggcgcgattcgcggcactccttgtcgatccgacgccgcaggtcgtctctgagagaccgagaagggtcagcatcgcctcatgcttagcgaggagggcatcgcacgtacgcctcgagaccaagccgctcggtcagcgcctcaaagtgggtgaagcgctctttccctgccggaacgagccaaagagcggtcagcgtcgagcgagggattgggcaagaatggacgtcacgtacagatctccgtctcgtggacgaggaagccgagccgccgactcagacgtccgagcttgctctccatctgcaagtccacaggcatcagcacctgatctgacttgccatcgagggcggtcaaggcgcatggtgctcacctcgtctcgcgtttcgatgaattggagggtacgccgacgcatcgcaacgcgaccgacaagctcggtctccgtcagaggctttactttgggcatagagctcgaggaaagtcgcttgagcaagctcggcttttttttctgtgccgcaggatcatggtgggagggcagcgtgagtgagattcttctgatgggctcagtttgggaagagagcgcacctgctcggtcagcatctgctcgaaggccaggatgacctgcgactgattccaccacgtaggggccgctgcctgttcgatcgagaagctttctaaagcaccggtcggcagctggagctcgcctgcggggtgcagtcacagcaatcagtcgacgacttcgcactcttgaaatgggctgaagagagcgctcacagtggggcttgagacggccgtcggggtaagcctgacgcagctcgggcggcacgccggcaccgccgtttgccataaagccctcgccgagagtcttccgcagcttgacgagcgcctttgcgcgctgctgttgcgagggcaggccgatcggaggcgatgggcagttgacaaagttgatgtcctgttacgaagccgcaagtcagatcctcgcccggccagctggtgccgtgatgacaaaccgacaaggtcgacgatgcagacgtcgggtcccagcttggcgatgtacttgcactcgacattctggtggagggcggaagtcagcgacgagacgggtgtctgtaaaagatagagcgtattggacgcacgacaccgaggatgaacggcccctggtcgtccaggaagagtggaatgtcccgagaatggacaagaggctgagcaattccaggccaggagccgcgcagctcgcacaggtactcgagcgtcaggacgcacggcgctagcagtgccgggaaggcgctgacgaggacgaccttgccagcgttgctgagcgcaatgtcgaggaccatgaggaggtttgggaggctcaggacttggagcagcgggggcatcgcccagccggccgtctggagcccgacgttgaggtcgagccgagggagcggcgcgacgagctcgacggcgtcgttcgaccgctcgggcgcagtgatcgaatcaaacacgatcagtcggacaaggccgccaatgcgtgggacgggcgttttgagggcctgcagcgaaagaagcagaggtgagcgtttgccgggcgcacgctgaagggtgaaggacggacgagtgccatctggcgcgagtgcgcgccgacgtccttcgagaagcgagcccaggacatcttgaggtagtcgtccatgagactgtagagcggcatctttgagactagagtgagctgatgaggggacaagcgcgaccagtcagccaggcagatcaggtgggcaatgggcacagcgcccgacgaacggcgtagggcagccagtagtcgctgcggtcgtcagtcgtcgagtcagagttgaggatgaaagcttgtgagcggaaagagattgcggccgcgcgggacgacagcgccttgcggatcgccgactgaaaagcagggcaacatgaccgctcgggttagcctccatcagcccagaagcagcggccgtggagcggacaaacccgcttggcctcgtccgcgaccgagtagacagtcagcgtcacgccgtgataggtgtcgctgcagcgtcagagggccgtcgtcagcagagatcgcgggttttaagggggacgaagctgggacggacgagtcggcaccccggaggccacttgaccgtccgctcgagagctgagtcgacggctggagctcgaacgagaaagtgtgcgacgtcgcctctggccggaccgttgaccgcaggatctcgacctcgcgcgggaaggcgtactgtcggcgaaggggaggcgagagccgtcagcaaggagaggcaaccagagcagcaacagctgctcgtaccttgagggccttctcgcagagcttgacctgctgcttgtccgcatctcccgagacgcctctatcgaccgccggcgcggccgaggcgacgttggtacccagcgcctcagccctccaccactcgccgacggcaccaggccggtgctggagcttcgagagagctggatcggatgcaagcgacagtgtcgtccacgtcgccgtctgcttggggagtcccgccacctgcgaaggagcgaggaagatcggctggctgtcagctgggttcgccgcttggtcggaggtgaggggggatggcgagagacggacgaggtacaggcagcagatcgtctccgtctcgttgccggtcagcgtcacctcgtgcgtcctgagctggccaccgaatgcagactctgatgcctcatcagcgagggctgacgacggaggagtgatgggaagggtcggagagggaggcgcaagagggctgcctccggctcggctcgggtcgagcacctgcgagggctcgcgcagggaagttgccggcatgagggcgtcgggctgaagcagagcgaggcggatgcgctcggaggtcggccagagtcctttcaggctgccgagctggtcgtcgtctagcgagaagaagccttgccagcccgaggtcggccaggggtcgctcggcctctgaaagcggctcaacaggggacgagcccatcacatccagcccctttctctgccgatcctcgtcaggcacctcgccgagctagggggcctggtcgatgacggggtcctgcagttgagtaagacgtgtcagctagccgcgccaggtccttgcgaaggtggcgtgcttctggccggcctggagggaccatggcggttggaagagaagggacgtcgagcagcggccgggccgtctcctctaaagcactaggcacgccttctgctcgctcgcctcctggcatcgaccctcgcagcaaccctttctcgatcccccctctcccattcacagcctgagatctagcaggaacggcccgagaccgactctcgccccgccttcgcgtctctctattcgcaagcagtcctcatctcggccgagccaggccgccggcgagctcagcccacgcatcaccccttagaggccacaagcccaccggtcgccgctctctcccgctcgcatgctcgggctctttaactctcgctttctgcggaccttcgtctgctgtgctctggtactgctcgtgagtgctgtcgctgccacggctggcgtaggccagcgagcctcctcggctgggatgacgctgacctgcctgccccctcctcctcacctcgcgtcaccgatctcctgccagatcccggcatcctacttcttcttcgtcccagcgccggctccatcgcccgacgatgcagctttggccgacgatggtggatggggcggctggtcctatccaggcagctcgtcgccgttaaagggcgccgacctctcaccggaggtcaaggagccgcttgcggtcggcctcagcggcgtgccggccaacgtccttagcggcggcgcgatcatgggccacctcggcaacgagacggccaagtgcgtccccttctcgtctgctgagcgcactccaaacgacatgttgaccctctggtctctgcagggctgagctcggccgggcgtcctggaagctgctccacctgattaccctccgctttcccgacgtgcgtcccatctactcgcgctacctgccgccctcactgatactgtcttaacgccttgctatctcgtgtccagacgccctcgcccagcgaacgtgaggcgctcaagtcgtactttcacctgtttgcccgcctctacccttgcggcgagtgcgcggcgcatttcatgacgctgctcgaagagtatccggttcaggtgcggcacgtcctcggcagtcgtcgagtcgcccgaccgctgacgccttctcgagctacttcttgccagacctcgtcgcgtaaatcggcctcgctctggctctgccacctccacaaccagatcaacacgcgcctgctcaagccgcagtttgactgcacgatgctcgatgcgacgtatgactgcggctgcgggcctgagccggacggcgcgaaggccccatcgacggctgctgatggcgtcagtgacggcatcgtcgacggcaaggatgggatcacgggcgttgctgtcatcaagggcgggcggtagcgatcacccgctttacaggcatcctagcagaggtcgtgcgtcgttgaaacgcggcggcgtctcgaagcggctctaatctacctcgttcgtcgcatgcaggcgtcgtcgctcaacgagcacagacgctgccgcgcgtcagacgtctcgcccgacagcgcaccggcggctctcggcggccgtcccttcaattgctcgagcgtctgctcttgccttcggcgctcgtcctcaagcttctcgtcgccttgcgggtgtcgagcgaccctcgcctcattttcgaccgtccgcgactcagcacgtcgagatgcggctttcgcccgtatcccgcgaccggtagggcgcattgcgacgcctttcagctgtcgaagaaagctggtctattcatcatgaaatcatgcttgacccctctttcgctcctcttatctgggtgtgccctcgtcgacgcgtacgcacaagagagacccgaagccgaccctttcgttttctttcctcgccgcgccggcgggccgaacgccggcggcggccagccccgaagccgcccttcgacctgctgctccgtcaaccgcgacccggccgcccaacggagacgacccgggccccatctcgctaggctgaaccgcgaacgagcagttggctgaccggcttcggcgcccggcgcccgggctataaaacagggcagaagctgacgagcgcgccatcgctctctctcagccaacctcccgcttacctgcccgcccccgacctcccctcgacctcctctccaacacccatcgcctcccagcaacatgaacagcaccggaactgccaatatcgccatcctcggctgcggccgccagggacgtggtacgtagcagctccctgccctctgcgccttcccgccctgcccgccttcccgctcggtcctaaacatctctcctagcgctcgcccatccatccacctaaaatcggcctacaattctgcacatctgctctaccacacgttctgcatgacgacatgcatcacgcccggcagttcatgccaacgccatcgtctcgatcggcggcgttgcccgccttcactcggtctacgacgccttcgaggcggcctcggtcggcctcagcgactcgcacccgcaccggcctaaggttgcctcttcggtagaggagatcctggccgacccggccgtcgacgccgtcatcatcgtcacgcccaatgcgacgcacgccgacctcgccctcaaggtcgccaaggccggcaaggcctgcctctgcgagaagccgctcgatcgcgacctcgagagcatccagacgctccggaccgagctcgccaaactcgccaagcagggcccactgccgtacatggcggtaggcttccccaagcgccaagatccgaccttctcgtcgatccgggaggccattcgcaacaagaccctgggcgaggtcgagcaggtcatcatctggtcgcgcgacgtcaaccctcagcccaaggagtacatgaaggtctcagggacgatgattgtcgacagcgccatccacgagtttgacctcgctcgggctctcctcggcccggacgactaccccgtctccatctacacggtcggctcgacgctcgtcctccctgaggcctgcgccgaggccaacgacgtcactcgaaccaacatcacaatgaagaccaagctcggccgtctcgtctgcctccagagtgagtccagctttgggccgtggcagacgcatgtcatcgctcctcattcactgacgacttcctccgctgcctgtcttcagacgcccgtcgcgccgtcgctggtcatgaccagcgtgtcgaggttcattgcgaacggggcgacctcaaggcggtacgtgctccctttcaaagactgatcatcacccgcagcgtgctgacgacccaacctgctgcaggagaacccccacgcccacgacaactacctcgtcatctcgaccgctgcctccggcgcggccacccagccgatgtggacgacgacggccgagcgctacacagtcgccatgctcaatcagacgcgtgagctcgtcgccgcttgcgtcggcggccgggggcctctccccgatggtcagcaggtcggagccgtgcgtccttttttccgcacatcagcctctccgacgacgatgactgaccggctgaccattctgtcgccctggttgtagactatcgaagacggctggtgggcgagcaaggctgccgccgccgctgtgcagagcctcagggagggcattcccatccagctgtcgctcgactgaggtcgggaaagaaggggttgggacgaatgtattgtctggcgcttgcatctacttctctctcgacagagagcacattgtgtcgtgcgatcgggagttggccactgctgcatagatctcgcagcgcttgaagggtgtaagccaagatcgtaaggcgaccgtgcttgcatggagcgcgacatgccatgctggtcgactcttccatcgacgtcggagacagcaacgatcgccgctgctttagatcagctgatatataattaaatcagtcaatgaactcacatacaatccctgttcgtataacggccattatatgcgcttttcatcatgatcgcgtgagacccgggttcgattcccggacggggagatttgcttttactccagccgacaactccagccgacaactccagccgacaactccagccgacattcttttggccctcaccgtcagccctgaagaaaggacgggaagagcacttgaagcacagctgggacccgatggagaagtctttcttgctagagctagatgttcatccggctttttgacggccgacatggcaaaagcaggctgccgccggcttctcgctgcgcggagccgtgccggcacgctacccagccggctgagctcgcagtcggccccggctgaccctcatcttctgaactttcacctccccgaacgatgcagtccagtctttttgcagcaggcctccgctccagctcgcgccgcctctttcgcctccgtcggtccttcacgaaccagccgccacgggccgggtcgagctccctgacgccgattctcggctcggctgtcgccgcctcgacgctcacctacctcatcctcaacccgccgacgctcctgctcgacgtcttttctggcattcccgagccgcccatcattgacccgcgctttggtaccaaaaccgactttgacaacgccgtccacgaactcgtcggctcgtttggcgaaggcgaccagtgctcgaccgacgccgacgtcctactgtcgcacggcttcagcccaaacacctaccatgcgcctcgcgtgccggccatcgtcgtctgggccgagagcacaggtgcgagcgcacctttgaagctctgtaccggcctgccctagacgctgaccggggctctgtggttctcgaccctcccagaggacgtcgtgcgcgtgatgaaggtcgcggtgcgtcgtcgctctaaccgcacgcgtcggccgtcggacttgcccgcggcacgagctgatcacccgaccctgacaccgatagaccaagtacaagattccggtgacgccgtggtctggagggacgtcgcttgagggccacattactgccgtgcgtcgacggagactgttgcgagggttgactctcgtcgcgcgcagccagtttgctgatgcaggttcccccggccgcctgcgacaccagccgtacggaggcatctcgattgacctctcccggatggacaaggtgctcgagttccgcgaggccgactcggacatcactgtccagtcgggcatgggctgggaggacatcaactcgtacctcgccgaccaggacgtcaagctcttcttcccggtgcgccctggcaggccttctcggattccagctctggggctgacagcaagcatcggagctctgaacgcagctcgacccaggccagggcgccactgttggaggcatgatgtgcgtctctgcaggcggtggtgccgcctcacagctgcaccgtcgctgaccgctttcgctgaacagggccaccggctgctcgggcaccaacgccgtccgctacgggacagccaaagctgagtggttcttgcaggcggtcagctcctctgcgtgctctctctcacacccttgcagcacctgactcgcccaccccgtcgagcagactgtcgtcttgcccaatggcgaagtcatcaagacgcgcagtcgagcgcggaaaagctcggccggcttcgacacgaccaagctgtgcgtgtagacggccactcgacctgaagcgagctcgtctgaccccaatcggccaatacataggttcattggcgctgagggcacactcggcatcgtcaccgaggcgactctccgtctggcgcccttgctcgagacgagcgtagcaatttgcagcttcccaagcgtccagtcggcgaccgaggccgtgcatgaggtcagcagcgagcctgaccaccctggacctcgctcttgatctgactctttcagctccgctcgcccttccctgcaaaggtccttaacgcgggcgtgcccatccaatgcgtcgagctttgcgacacgacaatgatgaaggccatcaaccaggccgcgctcactaacgtcagcctgccgaatcgcgacagtatcttcttcaagttccaggggtccgaccgcgtgcgtccctagtttctgcctactcgaccagccccgtctgactctgtcatgcgctcgctcctcgcagatgcgcaccgaggcgtacgagatggtcaaggcgatcgttcccaagcacggcggcgacgacctgcgcaactcagccagcaaggaggagagcgaggagatctggcgcgggcgcagggtacgcttgcttcgcttgcctcattgtcgctgcctgccgcccatttgctgatcccccttcttgtctgtaggtcgctcactggtcgatcatggccctctcgcccagcgccaagtcgtggtccaccgacgtctgcgtgccggtcagcaagctgcccgagctcgtccagaagacgcaagaggatctcgccgagtgtggcctgacggcagccgtccttggtcacgttggcgacgggtgagttcatcagccactgtcaggctcgatcacagcgctgaccgcgtcgcttgtgccctgccaggaatttccactgtggcatccttttccacgatgagagggagtaccacattgcggacggcgctgtccatcggatggtcgagcgcgcgattgccctcggtgcgcttccttttcctgaccttctcagccgaccaaaggactgatcggcaacccctctcccccgttacagacgggacgtgcaccggcgagcacggcgtcggcgtcggcaagaaggagtatctgatctctgagctcggcgaggggaccgtcggcctgatgaagacggtcaagaatgcgatcgacccgctcgggatcatgaacccgggcaaggtgagacgagcggtcgggccgccctagctcttgcagtccgatgaccctgatgcctgctttccccgtttgcccagctgtaccccgacgaggcgccagtcgagcaggcggcgggctcatactctgcttgaggacagctctctttgaggatagaatggcttttaggtcagcgcttgctagacggctcggctcaaaaggcgctcaggtgagctcatcacgtcggagagaaaaggtcatcgctcgcataggctacagaggggcagtcggacgaggcagaagcggggggaaaggacgggcgcgcctccttagagctttgatttgaagtcctgccagaggcggtcccaccgggccggagggtcggtttaggccttagtcgcggccttcagtgggacgatggtggggtggttgaggtcagctcacctgctcggcctccgaggtcacgccggtactcacgtcgaagcggcgctgagcctcggcaaagttgcagacgttccagtaggccgcgaggtagtcgggcttgacgttcttgtactggaggtagaaggcgtgctcccagatgtcgaggccgatgatcggggtgagggctggagaagagggcggcaaggtcggtcagcggcagcaaggcgggcggcatacgttgcgctggtgacggcacgcgacggcacgcactgatcagggggtcctggttggccgtcgtggcaatctcgaggtgcttggtggccgagttgtagccgagccagccccagccggagccctggacgccgagcgtggcggcgttgaacttcttcttgaactctggcgcgccgggcgggcggaagcttgcacatgctaaccctctgcttgccgccgtcatcctgtgcagccaagcagacttgagagctccgcaggcaaccgatgccgtcgtagacagctctttatcgttcggcagtcagtgacacgaccctcgttccctcaagtaccggatgtagggcgataaagaaggtaggagggggagggggggtggatcgatatgctgcggcgcgacatcaatgcatactcgagcccaccaccagagcaagctttacctgtttggcggtgaagatgaagtattggcgttagtgttgcttgacacggtctttcagcagcgtcatgcctcctgactgagtgctggcgctggccgtggcccggggatctgtttcaaaagtatgactgggctggctttttccattgaggtttgaggttgctcatgcatgaccgcgttgcttgttagagtcatcctgaagatctttaagggaaggcctgcaggttcgagaaaatggttcaggacttaaccgtgcagctgttctggctcggagacgcgatatagagacggcggctggacgcgaaaagcgctcggaaggtgttcgtccgacccgatcgagcagatgagaaaccggcagtaggcgaacttgccgtcagcgctgatgatgattgcgcgttgcgtaccggcggcgtagcccttaaacttggcgctgctgccgctcgagagcttgtggcgtttgaacaagtcactcttgacgccgccgcccgtcttggccgtattgaatgcctgaagacgacgattcgcgatgccgacttcttgtgctgccgcttgcttgccggtgaagccgccgtatacggcgacaagttcgagctcttgtccggtggccggatcgcagcgtatgacgacgccgaggtacgacccgggcaggctgcccgctcgtcggagagagactagcaatcaagcgctcgccgaacgcgcagggtaacgaggggggagcttctcggccggcagcattttggacaagccgatgacgccgagcaggatggccgggttggtgaggagtgcgaggtcgcggatgacgtggtcgaacgtctcgcgcaatgtgaagattctccacttcttttgtgcagcagccgacgctgggaaaagcagcgcaccgtctcgacgacgtcaaaacggtcgccgctgatgacgaaaagattgatctgacgctgcagctcgaaggttcggaacgtgtcgtcaaagacaacgtcgggcgcgctgacggccggtcggtgccgtcaagcttcgagctcctcggtcattatgcaggagcaaggtcaagctctgcggacgacatctgggggtcagcgtctcttgtgccgtcgttcgggaggccgacgatcctctaaggtgtagctgtgatccccgaagcggacggattgagcagcacgggcggcgtaggcggcatcaaaagttggcgggggtcgttgccgttgtctttccatgtacgatgacgcactattgagattcaagaagtcaagtgtcggcgagcgtgtgtgagagatagagagttggatgcaacgtcctgtggagacgtgcaacaaggagtcatggctgcgaagaccactcgatgacttactgacgtgccgtctggctcgcatgatcaattggagccacaacgtcgagttgggcaggaccaaatccaatgcacgctggaaatgcacgcactgttgttcgaccaagtacttcgtttgcgcacgcgcacgtaagacggagactggcgtctcgacacgaacgaattgtagatcgaacccgatgtccagcatgaaacggcagcctccgtatgccgtcgtcgaggactgacgcggtctacacgagcctttcattgaagttcgcaggtaggtcgaggcggcaaagtcgggcgcttgcggggcagaccgggcgctgctgagattggaaggctgcagcggcaaaaagtatgatcaatagcgggatcgaaccgctgaccttggcgttattagcaccacgctctaaccagctgagctaatcgatcaattgataagatgctggaaaagttatcaaacaaatactgcgcttggtgcgccgtccccaaccagcgcgtcaggtggaatgtcgtcgagaaagcggtctctgacagcacagacacctacctgacctctcttgatgcaaattcaaatgtgacgcgatgcttccgttccttgtcgggcaccggcgggctacgataggaacattgacaacggcaggcctttcgaggtcttgccgaacgagcagtaattggtcgtcagctgagcaagacaattgtgatgaccagagataagctgcggctcgccgtcctggctgagccgcaggtcctgccgtccgcgaagctcagcggagataggcgaaggcagagggcggcaggccgtcgccgggcgtccagacggacaacagaggcgactcagaaggcgagtaaaaagacgataggattgacgagccgcccagaatcagcggcagccgggtgacgcttggatctctagcagcaggtctctaagcctgacgtccccttctaggcaattcaaaacctcctctgcggaggttactcgcgtcgggaaaagctgatcagtacgacaagatgaagggcggcacgtcgttgtgtgtcctagtgagctgcgcgctccgacgcttcacagccgcctacttacagctggcgctggtttacaagtacgtcggtgaaattgtaaaacgttccggccgccagttgcagagtttgacaggcctgaagttgacacgagggtccccagacgcagcctcaaatgcacgcaccttgtgcaaaatggtttctgtccaagagaggcctaggtaatattttgagtgcgcgttggacatcctcaacacctgaaacgaagactacgtgggctgcctaatgtacctatcgatctgcaccaatcagaaaagaaacaggcggcttgatgccgactttggcgatactactcatctgatccgatacaaccggtcatggaccaagctgtcgcgcccgacggtgttgggcctttggtcggtcgaatcagtcctcttcagtaaccttgctgaaagagcgagggagatccaatcacccctcgtctttcttgttgaggagggtgcgtcgtggcggtttggcgggcggtcgcccagcgcgctggcgcgccgccgcccgccagcgctctccccctacatattgcttccataatctgtcacccctccgtaacctttcggccaagcaaaatccccttggtaggctttatatgatggaaaattcacgctcctcttacaacttacttcactgttacgcctagtctacaacctctccctctctttcccgtccttttcacttctcgcaccaaagagcatctattcatgtcatgcgttcacccaactgtcctccccccccccccctaaggaccgtgcttgttcaacatttgttgcctcgcgactttgctcagtacttacgttaggtgctgcgcagctgcgggcaatcgctgcattctgaccaagcaaaccggcgcggcgaatgtcagtcacactcacactaggctgacgcacatttggcctgagaagagcgacaaaggacaaggatcgaagctggaagatgcagcagccatcggatctggattgcctgtcgagaggcgaaatgatctgcacgaaatgaccggatgccattgtgccttcctttcctcaggtggacggctgaatggcgcagggctgccattttgctgttgccatcacagtcgcacattgtcgcaagacggcatcgacgcttgctcttgtagcaaaaccaagtcgtactagcctctggtttaggacgtgctgcccaaacgggaaagtcgcgtgtgcaaaaccaaaaaacagtctgccgagatagtgctccaagcaaggtatgtgaggcatacgttctttctccctcgacccatgcttgcccagggtgattccgatgtagaagaaaacctcaatgtcaggcaaaaggatttatcgccgcggggaatcgaaccccggcctagtgcaaattgccagatggcaagcaccaatgaataccacttcaccacaacgatttgatacacgtaattcaacactaaccatttatatccacgacggcctactgaccttatgccctttcacccgttttccagagatggcagcgttgtgaaagacgcgatagatctgcacagtactttgctaatcttttcctcgcagagcagaaaaggtcccgccccatcgagctgctactgttgaccgcctcgcgcaaggaggacgcgacgcgcggtcacagcagcagcagcttcggcttttcgcgcgtcgctcaacctgagagctcatttatcgacggacacacctccctctctcatcctctgaagtcctcttcttgaccagtcgccctcctcctcctgtcagctagactgcctcgactctccttcgccagcatgtcttcctcgcctgccgtcaatccttcgcggccgaagcgcagacgcgacgagctgccaccgtcgtcggcaccgtcgtctccggcgggcgacctcccaccgtcgtccttgccgccatcgtcgcctccgcagccgttcagcgacatggacgacgagcctgtcgaggacgaggacaaccccgaggagcgtgccctgcgcgaggagcgcgaggaggaggatgacgaggagggcgacgcgcccgatgggctcgagggaatggtgatggaccagcttgagctcggcagcgacgagggcgagggcgacgacctccgcgtcggtggcatcgtagcgtgcgtctcttgcttccttcttgcctgctatccttctcacggccccattcgcgtccttcgtgtagccgacacgcgccagcatcccatcgagcgccgctgctgacccgctgtcgtcgtcttgcccccctcctcctcctcagcggcgacgacgacgtcgaggactacgacgagcggctcgataactactcagacgctgacctcgacgacggcgagtacgaggccatgaccgctgctcagcgtcgggccgccgacgaggcgatggccgcccgagacaagcgggcgaagcagtcgcgccggcagcgtgaccgggcgccagccttcatgcagtcggacgacgaggacgagcgccaggagggcgacgacccgctccagggcatcaatcaacgccggcgccggcgccagtacgacgaggtccgccaggaggacgacatggacggtgtcgaggacgtgcgttccctccccttgccaaccaacaggtcgccttccgcatgtccgcccggcctcgctgacctctcagttattgcttctaccgctcacaggaaattccctttcaagacttaggtgacatcaaagcggcctcgatcaacgagtgggtcgcgatcccggccgtccagcgttccatcacgcgccacttcaagcagttcctcatgacctatgtcgacgagaacggcacctctgtctacggccaggccatcaggacgctaggagagcgtgcgtcctgcctcgccactctattatccgtcgccgccgtcgccgtcgtcgcggcctcacactcacactgaactgacgtcttgccgcgcttccgccagtcaactcggagtcgcttgaggtctcgtacctccatctcgcggcctcgaagccgatccttgcctactttctcgccaactcgcctcagtcgctcctgtcgatctttgacacgtgcgcgctcgacgccattctcctctactaccccaactaccaagagatccgcgacgagattcacgtccgcatcaccaacttgccgacggcctcgtcgctccgcgacctccgccaatcggacctcaacggcctcgtccgcgtccagggcgtcgtcacccgccggagcggcgtctttccccagctcaagtacgtcaagtttgactgcggccgctgcggccacgtcaacggcccgtactatcaggacacgatgaaggaaatccgcatctcgttttgctcaaactgcgagggccgcgggccattcaccgtcaactcggagcaggtgcgcgcccgcttcagctttcgtcagtccccccccccttcttatgcttgcagactgacaagctgctcgtgcctcctttgccagaccgtctaccgcaactaccagaagatgacgctgcaggagtcgcccggctcggtccctgccggtcgcctgccccgccaccgcgaggtcatcctcctctgggacctgattgactttgccaagcccggagaggaagtcgtgcgtccggggcctgaaagtggaagtctgtcgcagagcgccgctgacctcccctttcgaacgacccgcaggaaattacggccatctacaagaacaactttgacgcctcgctcaacgccaagaacggcttccccgtcttcagcacgatcctcgaggccaaccacatcaacaagaaggaggacctgttcgccgccttccggctgagcgaagaggacgagcgcgaaatccgaagcatgtcgcgcgacccgcggagtgcgtcctcggttcgctccctgtcctttgcactacgtctctgaccgcttagcttcccttcaaccagtctcgaagcggatcatcaagtcgatcgcgccttcgatctacggccacgaggacatcaagacggcaatcgcgctctcgctcttttctggcgtgtcgaaagacatcaaccgcaagcaccgcatccgcggcgacatcaatgtcctcatgctcggcgacccgggaacggccaagtcgcagttcctcaagtatgtcgagaagacggcgcaccgggccgtctttacgaccggccagggtgcgagcgcggtcggtctcacggcaagcgtccgcaaggaccccgtcacgcaggagtggacgctcgagggcggcgcgctcgtccttgccgacaagggcgtctgcctgatcgacgagtttgacaagatgaacgaccaggtacgcagccgatcggcaggcctaccttaagcgccccttcgctgacagcaccttgccttgccattacaggaccggacctcgatccacgaggccatggagcagcagtcgatctcgatatcaaaggccggcatcgtcacctcgcttcaagcccggtgtgccatcattgccgccgccaacccgatccgcggccggtacaacccgacgatcccgttccagcagaatgtcgagctcaccgagcccatcctttcgcggttcgacgtcctctgcgtcgtcaaggacacggtcgacccggtcaaggacgagatgcttgccaagtttgtcgtcggctcgcaccttcgctcgcatccgagctttgacaaggacgtcgacgaggtgacggtcgcgacctcgctcgacgaggacgtgcgtctcacatccgctgccattcgcgctcttcaactcactcggctgacgtctcctcttgcgcgttgttcctcgctcgcagatcatcccccaggacatgctacgcaagtacatcatgtacgccaaggagaaggtcaagcccaagctgcacaacctcgaccaggagaagctctcgcggctctacgccgaccttcggcgcgagtcgctcgcgaccggctccttcccgattacagtccgccacctcgagagcatgatccggatgagcgaggcgagcgccaagatgaacctgcgcgagtacgtccggagcgacgacattgacctcgccatccaggtgacggtcgcgagctttgtatcagcccagaagatgagcatcaagaagacgctcgagcgggtacgtcctgtttccttctctaaatccgtcgtcactccgctcacgctgccgcatcattccagggcttccgcaagtacctcaaccaggcgaccgatcacgaggagctgctcgccttcatcctcggccagctcgtcaaggagaaggccctcctttactcgaatctgcatggccagcaggccgagcaggtctccatcaagctctcggagctgaacgagcgggtgcgcgacgctttgttccgtcggctcgccttcttcttcccgtcactgacaccctcgccttgctcgcgccatgcctcgccaggccaaggagctcgaaatttacgagacgcagccgttcctccggtcggctctctttgcgcgcaatggctactcggtcgacggcaaggagattgtcaagcgctttgagcggcggcgcgtcgtcgacgaggacgaagagatgtgagggctgtcgctcgatcctagagtctcccttgtccccttccttctctctggccttttcttcacgaccgtacgccctgcctccttcctctcttggtcaccctcatcgtgtacgactgtcgtcgctgcttgtatcaacgtgctgttcttgggatcgctccccccccggcgtgcgtgcgacatgctgtgctcgagactatttcgttctggcaagtcagttcaagtccccccgttacaagcaggatccgccacagccagctccgcagtgcctagcctgcgagaagagcgattcgagcatgctaaaggtctgtcatggcgcgtgctgaacaggacgcgtcgtgaccgccgtctcgccgccgccccgccgacgtcgacttttgactcgcagccctcgcctttcgcttccccatctcctgatctaagcagctcgaccaggtcagctcctgctcgccttcatcatggcctctccagccccggcctcccgctcgccaacgccggacatggtcgccctgccccaggccgagtcgccgccgacaccgccgccggctccgcctctccgaccgccggccgtctcgcgttacctcgacgagcacgtctctgcgcccatccatccgatcccgttggcgccgctgctctcggtcgagtacccgggcttcatccagccatcgccagcctcgctccagcgggcgctcttcacgatgggcgggccgacccggctcgagacgctgctcgagcctcctgcgccgccgtcggtcgcggtcgaacgcaagcccgtccccggccactctgccagcctgcccatcgtcgagctcaactactcgctcacgtcggacgcgcccgaggtcgtcgaggccgcccgctggaagcacccggtcctcggccaagtcatcgacggcgacaagctcgtgctgcgcgtcaagaagcgacgcaaggtccgcgtcaaccgcgagacgggcgagcgcgagcagctcgaggcgggcgagtacacgatggaggtcctcggacctgtggccaagacagtccgtttccggagtgcgtaccgagtgctgagaggcaggtctccagttacgattgaaaagctgacgtcgaaccgatgacccccccccccccgcgcgagcagacatcgccgaccatcagtacaacccgccgaccgagacgccgacggctcagtacctgcatgccctgcgcagcctcgaccgtacgtgtatcatacgctgtctgcgatcgctcctcagctgaccgcccgttgcggacgccgcctatttacgtgtgcccgcccagacgacttcctcctgcacgagccgttcccgccagagacggaggagtacgccgtgccgctctcggcgccgacggaggccgagatggacttcaacgacccagacgacggaggagagtcgagtgcgcagggccgggagcgacgcatgcggtcgaccgccggcatctttccgcctccgatgttcagcatgcaacgcgtgccgttccggtacaagtgagtccggccaggggcttccagtagaaggcgctccttcctgacctcttgtcgcccttcgtcgcttcagctacaagcccaatccatactcgtcgctcgttgcgctcgccaacccaagtgcgggcgaagaggagcagcagcggctttcgaaccggagcaagaacaagatcatcggcgtcaacatggtcaagttccatccgggcgtggtgcgtcgcgatgtccttagtcacttcaacttcttctgcttcgggcagctgattaggccgcctccctccatcccagccggtcccgaccgacccgccggtcggctggaagcgcaacccctccgaggaggacttcatcaaccggctgaacaagattttttctgaccccggcacgtacgcgcacgagggcatcgagtcgcgcccggtctggtcgcgggctgcgctggccaaccagtttgccgagggcgagaacggcgtccggcaccggtgcgcgcccgttaccgtcacatccaggtcgtcttccagctgacatcaatttttcgacctttagactcaagctcttccttcccggtatcgcctacaccttcgagggcggtgcttaccgtgacctgatggtccggctcggctacgacccgcgggaggacccggtgaccggcccaaggtatgtcccgcattacgtcggctgccaggtaccgccttcacccgctgacccatcgctctttttggaaggtaccagggtgcccgtctgcgcatgtttcactcggcgtcggcggtggaccgtgccaagcgttcgatcatgggctcgcgcaatgttcggcactatgcgagcagctacgcgaaccagaagctggccgaagtccttccaggaggagacatccggtgcgtctgccaattgtgctcgcagttcgacaaggaagctgatggtcgtatcgtctctgcagcaagacgcacctgttcgacggcgtcaagctccaccgcgactggcagaactttcagctgtgcgacgtctcggagcccgagctcgtcagcctcatcaacgaccgtgacggtatgcgcgagacctgcttcgtcagtatctctcgcacttgctttacagagcgcaagcgctgaggctgacatcgttactgctgttcgcggttcgcagggcgaggacggctggttcaagccgacccgctacacgctcattcgcgagatccttcggcgtaaattcaaccacctgctcgcgtcgggcacgccactcccggccggatcgtgcgacgagctcaaggcggcggccgagctcgagcagcagcgagctgacggcttggccgtcgacgtcgacggcatcgagaccaagtcggaggaagagagtgaccccggctgggtcgaggagggccgctctgcgagcgaggacgaggtcggcggcggaaagggcaaagagaaggccgggggtaaggtcaaggctccccgcaaggccaagcgcaagacgctcaacgcgctcatccacccgagcacgggcgcgaagagccgcaaggccgtcggccggacgcgggcccggcaggtcggcgtcacagacgctgtcgagatggtgcgtccctcgggccctttagcgacgtctgctgtcaggagcgctgctgatccccttgagtcactccttttttcgcaggccgagcgccttcagcgcgatatcgagcgcgaggcacggctgacggcgaacggcgttatctaagccagccgaacaatgggtctgtcggtcgggcagttgaatcacatgcgttcctcgtctgcttgcctgccttcgtttcgggtttcgcaagtgacggctgaaggcagcgtctcgtcgtcgtcgtcgattcgacaggaaggatcccacgctacgccacccctatcggccgtggtctcgagggggtcgctcactgccctccgactcaatctcccacccagccccatctccattccacttcagtctcctctacgctattactagtgaccagaccggccatgctcggaccttcgctcgcacccttgtgcgtgctggcggcgagcaccgcccgctcggctctcgccatcccgctcggctcgtcgctcgagctcaaccaggtgaccctcgaggtgccgagcgagatcgcagagcaaaggtggctcgcaccgcacgagatccagggaaactcttggttgtcaaagtatgacaagcagcgtgtcgacgtcgagggcgtcgtaacggccaggtcgtgcgtttcgctcgatcagtcgctatcgcaccgctctccgcagccgtccccccaagctgacgacgggatttcacctgcatcactcctcgtcggcttgcaggccgtacggcttctacatccagtcggtcgagtttgatgacgacgatgcaacgagcgaggggctctacgtgcgtccttctccgaatcttgtgacgccaactcctttctgccggacgctgagctcgactgcgccttcctccatcacccgccctcagatctacggcgcccagtcagcctcttccgtcaggcccggcgacctcgtccggctaacaggaaccatctccgagtacgcctcgctcgagaccggccttcacctgaccgagctcgtcttcccttcggcgcttgccgtcatgtcgcacggccacgagctcaagcccatcgtgctcggcgtcgaccgggtgccgccgggcgagcgcatttacgtccaggaccagctcgagctcaagccgggcatcgatatcgaggccggtggcgagccgctcgaagtcaaggtcaaagggctcgccttttgggagtcgtgcgtcgttgtggctgctgctgcgctcctctcccatcgacaatctttcgcgaggggctgaccttacttgtccctctcagtctcgaaaacatgctcgtcactatcccgagccctcgcgccgtctcgcggaccaactacatgtcggacatctggattgtgggcgagggctacgcgacgcactcgaacgcccgcggcgggctgacgaccggcgtctacgatggccaatgggacgctaacccggaggcactcgtgcgtcggctgccgctgtaaatctctgatgatcgcatcctagtaggacaacgctgatcctctgactccatttgcgccctgcagctgatgtggaaatctctcgacggcagccgaaacgagcaggtcgtcatggggacgacctttgaaaatatcaccggcatcgtcacctacctcgcagggtgcgtttccgctgcgagctgaagatgagcaagcgcttcgctgaccatagcttctccatctcagctcgcccgtcctgcttccgctgacggcaccggtcgttgccagccggcccgaaatcgcccacccgccgggcaaactgaaaggcgacggcgtctgccgagtcgcaggtgccaactagtaagtctccggtgcttctattgagcccatctagaagtcagatcggcctgacgtacgagctctgccaccttttctcgccagcaacgtcgaaaaccttaacccgcgctcgcggacgatcccgacgctcgccgagcacgtcgtccaccacctcaaccttccagacgtgattggcctcgaggaaatccaggacaactctggcgcccgtagtcagttgctctgataaatgagtgctgacaggacgccgttgctgaagcagttgctttcccttcgcccagatgacggcacgacggctgctaaccagaccttcaaagccttgacggatgccatcgccaagatctctaatgttaactatgcttggctcgatatcgcgccgaacaataatcaagacggcggtcagcctggtgcgtcggtcgtcctcatgttgatttcacccccattgaccgaggatcccctctgtgcacactttaccaggcggcaacattcggcccggcatcctgtatcggacggatcgcctcgagctcgaccctctctcccggagaggtcacaacgacgaggcccagtctttcgtcagagatgcaaagacgggcgagacgaccttcgcgctaaaccctggtgcgtccagacgttcgcgaagcgaacggccatttgctgaccgctctttgaccctcaggactcatcgagcccaagcacgaagcttggacagagtcacgcaagcctctaaccgcctccttcatcgtccgcggctcgaaagcggaccgcaaacgcctgcacgtcatcgtggcccacttctcttcgaagagaggctcgggcgttctgttcggtgcgccccggtcttgtctcgccctggctgacttgtagctgacaatcgatcttgctggcatgcgaccgcaggacgaattcagactgcagccaacggcgctgtcgaggcacggatcgctcaagcgacggtcgtagacgactttgtcgccggccttctcgccctcgatccggacgcgcacgtcagtcacctggcacgctctctgtttgctagcgcccactttctctcgctgaccgcagtgccttgctccgaacagctcctctttctcgccgacgccaacgaattctcaaaaactcagccgcttcagaggctcgaacagcacatggtcgagcttctggtcgagaagccagaggagcgctactcgttcagctttgaccagtgcgttaccactgcgatgtgctgcgagcaggggcagtgctgacgaccggcgtcgtcgcttctctggctcaggaactcgcagcagatcgaccatgcaatggtctcgccttctctcctcccgctttcccagaccgaaatccttcacctctcgacgcacggcagcaagagcaccggcatcgcgagcgaccacgaccccgtgctcgccgtcattcaggtctgctaggagggaggatcgcacaacattgtagaggagaagtatgaattgaaacttgtaaaacagcgggcgccatcagggcggcatacaaaaaaggtcgggggacgggcgagggaggtgaggacggtcaccactgcggaaggagcgccgcaggtcgagcttcagcaaccgagcacgggagggcaagagccggggcaaaaatcacatagtcaagcgagcggtactcgaccatcttgaggccgacagactgccgcttgcgcttctcggtcgcccacttcttgatccacgtctccctttgaggttggcacaggcgtctgtcagcagcccaacgtgagcgacgaggggggaaagacgcaagcgacctacatcttctcgcgcgacttggcagagccgacgttgacggtcggaatgatgcgcggctcgcccgggacagagagacagaagcacgtgagctcggtgaaggacgagtgctcagagtaaggcactggcaggaaggggagtcagcgagcgggacgtatctttgttcgcgcccgacaaccactcaccgccgagcagcatgacgcggtctgacgacccgcgcatcggcttgatgtccttggcgtcaaaagcattgctcgcgacccggtcacgctcgatcaaagtcgccaggtcgggcgtctgtgtcgtgcctgccgagccggcaaagctgcgagggtcaagcgagtcgtcagggccggctctaacctcgaaggcaaaggccaatgaccactcacgtccatccggtcggtcgaaagccgatgatgcggtcatacttgtccttgtacttgccgaggtggttggcgaggccctcggggttgatgtcgtgaagcgaaatcatgtggacttggctctggatgacgaggcgagaagcaggcggcaactcatccgtcagccgagactgatcgtcaggaggcagcggacgtgcgacgtacctcgtccgacttggacgtcatgagcgcgtgcagaaccgggtcctccacctggtcagcgatgagccctcgtttccgggcgtcggcaaagatgcgtgtctcgagcgcctgcgcgatacctgcaaggtcggatggcgttgcagatcagtgcgtgcctttgaccagacaagaagacgaacggacccttgacgatgcgctccttgccgatgctgtaggtgccgacggcgacaagcgtccggctccctctcaaccgagccttctcctcgcgctccttctgcgccgcctcgctctcatccctcttcacccatccagcgaggcccgaagggggcgcgaccgttgaaggaccggctgcgctgccgccgaagccagctccggcgccgagcacaagcgacttggtgagttttgagaccgagtcgatgacaactggctggggcgggaagcagtagtgcgggttgaggtaggtcgtgtcgaggtagacctcgtcgagcggcgccttttggacctcggggtggaggacaattttcgggcaggcgctacgagggagattgagtgagcgttgatgcatcgagagctgacacagaaggataggggaggcgcaccggaagtcgccgcagtgaaggtatcggtagatccggttcgagccgacgcccgagaccaagtagggcgagtcgccggcgttgcacgtccgtttgccctcaaacaagaagagcgcgcttccagggcaatggttggcctcaatcatcgtgcagacgacgccgcccgtgttgggcaggacggtcggcatgtcgtacgcgagcgggacgacccacttgcgctcgacgccaaggacgcgcgtgatcaggttggccgtcgtctctgcagtattcagcgcacgtcgtcagcacggcgcagtcgcgaaatgcttgacgaggagagggcgagcacgcacgagagcagtagatcggacccgagttccaggccttggaaagccgggtatagtgatccgagtgggcgtgagagaggaggctggcgaagcgacggggcaagcgaagtaggtcagcgcgcgttgagccactcaagccagaccttccaagagcaaacgcactaggcagtgaccttgggaatcttgccgtagcggaagccgtcgacgcagacgggcatgccgctcatcaccttgaagaacggagccttccggcgctcgccccgcgccaggaccttgccgccctgcttgatcgaccggtcatcctcgactgcctcccagatcgactggggcttcttggccatcagcattgagaaggcgttgggcgctgccggcttggccgacgatgggccgctcgagccggccggcggcagcgagtggcggatcgatgagaggcggttcgtcggtcggggctgggtgggccactcgggaggtcagcctcatcccgcggagcccgcgaggacgtctcgccgaacgtaccatgggcccgtcctgcttgtcgaggaactcgacctcgttctcggtcccgtcctccccgtcgtcgccgaggccgcccgcgtgccgggccatctcgtcgccgtcgccgaggccgacttcctcgagctcgtcatcgtcgtcctcgtcctcgtcctcttccggatcgagctgcgaaccctgctcgtcgtcgttcatcaggttgccgagctcgtcgtccactccgccagggacgaggtcgggcaggccgtcgacgtcaaacggctcgtcgtcctcgggccagtcaggcaacggctcccggcaggacggtagcttcggcagcagcggcgggacggcatagaagcccgcaccgcctgcgccatcgtcgtcaaacgccaggacgggcgacgagtcgatctcgaccggtccggcgtcgtcgttggctgccgccgtcgctgctgttgggagctgcgctcggcctttgcccttgctggccgacgcaaccgcctcgggccgctcgagctcctcgcccttgacggatggcaacggctgagcatgtgccgtcctcgaccgcttcctcggcggcggcattgatgcccctgctctgctgaagtcgtcgtcgtcgtcgtccgaggataagagctcgaccggctcgtccttgctgccgccggccgccttcggtggcggcgccgctcgcccgccgtcgaccgccgtccgcttcttgtcgggcgactggaagaacgagtggagcgtcgtcttctgagtggaaagcttcttggccatcgtggaaggagatgctaggtgggacgagagggagtgccgaggacggcgtggtggtggttaggagggtcgggctcgccaccgcctgatgacggcggccgacctcgcgtggcggggcggcggtgagcgacggcaacggctcctgcttcgagggactcctccctctctgatcctggctacgatctggctcgcacaaactcaagagtcctataaccaaggcctgtccctcaatactgacctcgtatggcatgcgacaggtcgggacgggtcgccgtcgaacccaccctcgcgtaaagtgaaacgccagagaaaggggccagccgccctttccccctctcccgctcctgtcgactcgtcattagccctgtcgacctccgccgcagcccggcgcagaagaagctgactggtagaaggcagctcgaggcagccatctttgccatcaacaaccactttctgcagcaatgtcaaagctttccatccgtctggtcggcctggctgccttcgtcggcctcagcctgctcgctttcgccaaccagctcatgtcgagcacagacacggctcctgagctagctgacatctcttctcgaccaagttgcgtcgctcgctcgccgagacccttgttctcgccgatcttcaagactgacgcgcaaccccatttcagacttcatttcctctttccattacctcgatgaacccgctcgcctgcaggtcaatcctctcggtcctcgtctacggctacgaccccatcctactcaactggggcgcaaaggagactggtggaaaggcgcggcagatcaaggtgcgttcgaacgttgacgcgacgatagtcgctgcgacgtcgctgactctctcgacaatgcaggtccagggcgtccgggactatctcgcccgaaacgtgaccgacccaaccgacctcgtcttcatggtcgacgcttttggtacatccgagtcctctgcccttccgccgaccagtttcctgactcggccctggacgatagattttggttccagcaaccgcccgaggtcctcatcgaccgctttgtccgtcttcctgcgtcccccgcctcttatccgacgtcccgaggctgtcaagcccctccgctcccagatggccgatccggagcgcgtcctgctcggcgccgacaagcgctgctggccgccgccggccaacgcagcaaagtgcattgacatcccccagtcgcccttgccggcccagatctagggcaacgcaaccgacacgggcgccgagctcgcacatgtgcatcttccttacacattccctttccgaagcgtgtcacgtccggtagctgacgcttctcgctcggttcccgcaggaccacacgtactacttcgaccgcccgcgctggcccgactcaggcaagatcctcgcgcaggcctcgctcctcgggccgctctacgacgacttgacggcgctcgccagcgagcgggaccaaaattttggcgaccagcagctgttcatgtgcgtcaccgccttcactctagtactccccttcgccttgctcgtcgactgatccttttgtcttggggagcgcaggtcgctctatcacgcccgcctaaactcgcccatctcgctcgacatggcctcgaccctcttacaaacgctcacctaatagagcagagacatcgccttcctcccctcctcacacgagctcgcgcccgtcgcgccctttcctcccgacaagccgcacgcggcgcccaaattcgcgcgcaacaccgcgtccggctcgacgccggtcgtcctgcactttaacggggccgaacaggcgctcatgaccggcccgggcggcgccagcagccgaggctcatggtggtcactcatgtgtttcgtcaccggcggctcgggctcagtcgacgagcaggcccacgtcaagccctgggtgcgcgagcgcgtgcggaacggaggggcgatggtcggcgcgacgggcgagtttctctcgtggtcgacgctagggtacgagcgggccgacgtctgggccgacgccgactgattccaagagtgattcatcgcatctagatgaggtcgtcagaaaatctcgtggccgtcgtcgaacagcgctcccagttgccgccggcctgcgcaaacgccatccggcctatgaagtcgtcgagcgagatgacctcctgcggcggggcgtccgagccgtctgtcgccggccagaggacgggcttgtcgctggcggtttgggcgggttgcacttcagctctagcagcaagctctgggcgaggcgaggaggacaaggtggtagggggcatatcacgcacttgatgagcatcctgaccgacttctcaccattgccgccgccgtatgttcgtcccgtacggtcacccttcatccttggcacaagccgctcaaacacaaagcgcgccgcaaacggcacgagctgcgcgacctcaaacagatgctcggggacggccggcggcgccgtcggtaaagggtcgtcgtcctgctcaggacagggggtgaaggggcgtcagggtcggggctgtgaccggcggggagaggggaaagacgtaccttgacgacgccgagcgctgcgaggactgagaccatcgtgttgtcgtggctcatgtctgccgttttcgtgcatcgaaccaacccgactcggtcagcttctgcctcacctagcagccacgcctaccctcccggccgactcacccagaaacacccgctcgccccctggcggcccaagcgtcgtctcattcgtcgccccggcctggacgacctcgtcctcatccgtcaggcgccggacgagctcattgacccacgaggcgccctttgtccgcccaaacggcgcgccgtgcgcgtgtgcgtagtacttcgagaggtcgtggcttttcccccccggtacagtcgagcgcgagtcagctcaaggcgctcgaacccgcggcggccgaaagaaggagagagagaaacggacaagtacgcattcgccgcccactcgtcggccgaaaagacggcgcaccatgggctgcgctggccggaagcgcctgaacggacagagtcgaagccgcagagcgacatgaggctgccgcgagggagggggcggggggaaagtgcaacaggccgttagtctcgagctcgccgcgcgagacgggagagagagacgcacgcaacgacgtcccacacacccagcgcgctcgcacccccgttgtcgtcgtcgtcccccgctggcaagcgcaagagtcggccaagccggtccgccacgcccggcgcatacgtctcgagccaagcaccttcagcgacgctccctgggtcctggcagacgcaatgacagccagtccagtccagtccggtcgagaaaaaggggcacggcgcgtcagctctcggggcgtcggaagaagcgaagaagcatgggggggggggggttgacgtacagggtcgagcgcccggtcagccgcgcacgactggacgctcaacgagcagttgcactctttcccaaacggcatcaccgaatcgaccgctcccttcctcctaccccccagccgccgcccacgacccccccccccccccccccagcgccggcaaggttgccgagatcaagcagaaggttaaggagtaccagtccaagttcgccgtcgagaagcgcgccgaggtgtctgagctccaggccgtcaccgctgtcacgggcaagaagaacatccaggtctactggaacgtcatccagtcgggcactgccgtcagccagggcaacatccctgccactgccatctcttcccagatcgccgttctcaaccgcgactacgggtcctacggattttccttcaccctggccagcagcaaggcggtctccaacgccggctggtttaacaacgcgtgagtcttcaggaggcccagctgcggaggcggtcgacgcgcagccgacggcccagctgacgccaagctccttcgcggccctgcttgctcgataggtccccttacgacgacggtcaggcgactcagactgccatgaagaactcgctccgcaccggcggcgctggcgcccttaacctctactcggtcggcttcaccaacggcgaggcctcgggcggtctcctcgggtgcgccctccctcccctttcttcctctcatcttctggcactgatgatgcttctacttgctctttagatatgcgaccttcccttcctcgtacaatggaaacccgaaggacgacggcgttgtcttccgccactcgactgttccgggtggcgcgaccacgagctacaacggcggccggacccttacccacgaggtcggccactggctcggtctctaccacaccttccagggcggctgcaccggctcgggcgacggcgtctcggacactcctgtgcgttactgtgcttgtgagcgggcttccgtgcggcgctgacacctcttactcattcaacaggctgaggccaccgctgcttctggttgccctactggccgcgactcgtgccccaacgtcgctggcctggaccccatccagaactacatggactacactgttgacaggttagctcgcccatttcacctttcgccaccctttccgcgctttgctgaccccctcctctttctgccagctgcatgacgggcttctccacagggcaggccgctcgcatggccgccatggtccagcagtaccgtggcctttaaatcggctaccacccttcacgccacggaaagagtggtccggtcgagttgcacgctcgagggacccagggtaggggagaccaaattggacgacgggacgaaacgagacgacgacgagtgctcatcagttgtagctataagcagaatttcagatgacgatgccctttcttgacttcgtgatgttgggagcgccggcggtccactcttcggccagccacgcttctcccttcgttcccgcaacctcttttactcggcctccttgcttgctctttgtcgacttgcgccgcctcttctcaagcgccatgctgccctactcgtctgtgcttcttcacttagctctcgtcctcgtcccttcgtcaccttacccttcggattcactcgagtagcatttttcttgctggccctttgcacgtggccgtctctcaccagccggataaatcaaggatgatcagaattcagagccatcggattgacggacgcgcaggtcggcgctgaaggaacggcggcgcaaggtaaggaagatcaaacaaggaggttcgggcggataagttcgtgggggcgaaggaggaggcaaaggcgagcgagcaagcgaggtggagaggacgcgatgagagatatgagaaggagatatagttagctgaagagccgatgcgagtgagacgagccagaaaggaaaggtgggggggggtatgcgagtgagagtggtaacagcgagactagtatgggcaggcagccttaacgtgaccgacagccgagcagcggaagcacttgccctcgcgcatgtaggccggcgcaagctcctttgcgagccagctctggaccggctggggtcgggcaattggaccaggcgcgggcttgccgacaaagagtgacgggaagagggcgcggagcgaggtgtattcgatgccagtcggcgtgacggaccgcagtggagcaagggcggccgtctcgagcaaagccgacgccgcagcggcgggtgcggggttgagcttgtcgtcgtcgccgctgctcgcacggacgcggacgcgcttgttgggcttcgggtcggccggcgcggtgccaaactcgggcatggtggccgtcgtcgagaagacgatgttgacgacggcccgctcgggcgagggcgaccggccaaagtcgccgccggtgaagatcggcttggccggcggcggcgtaaagggctgctggagcgagctgaagcggccggcggcggcgggcgtcggctcgtggtcgcccggcgtcgagggtgcattcgacgacgtcggcgacgggtgcgacgtggcggccgaagaggatgagacgaagcgccgcgtcgaggcgcccgacgaggccgaagacgatgaagcgccccggttctgcggcggcgactgctggcggcggtagtgcgactggcggagttcctgcggcgggacggattaagggaggcagaggttagtctcaaacgcgcgactgcttgcggaaaagaaaggcggtgcgcacctcgaggtctaccttgctgtgctcagcagcgagagcgagagcgccctgcgcgtcaggagcagctcgtccgtcagcgaccgcggaaacgtgatccacagcggcctcagctttgcgctgacgcgcctcggcgagcgcggtgaccccgcctgccgcctgcaaaacaagtattggaagtgggcaggtcagcatggtcgtcgctcgtgacagagagaaggatgcgggaggaacggacgtcgacagagaggtggctgtatgcgttgcgtgcggcctcctgcctggagagcccgccgacgacgacgggctcgccagcggcggagaggggggaggcgtgggccggcgacgcagagccggggacagtgcgagtccgcggaggagagtcgacatcgtctgcccatcggagttcctgctgcttgcgagcgatgggttgcgatcggggtcagcctgggcaagatgcaggaggtggaggcgcaggtgggggacgcacctggaagcttcggctggagagaaagtcatccgcctcctgcgtcgctgacggcgcgtcgatggcgggagctgcgaccgcttggatggcaacgacggtagagggctcctcgctggccggcgcgacggagggccgaaatgaatgctggccgccctcggcggcctggatggcggtggtgttgttgttgacgacgataggatcagcggcggcggaaggcgaaggagcgtggatgtcggccgggaaagaggcgatgacgggcgatggaaggcggcgggcgaggatggcgagtccgggcgatttgggccggccggagcttgcgagcggtgcgagagcgggctgagggacggcgatgggcgaaggaggcgtgaccggctcggcgacggtagatgaggacgagttggaggacgaggtcgacgaagcgagggacgaggcggcctcgatcgcaatcgaagggatgacggtcgaggttgggttgaagacggccgcggtcggtgagagcgacgacgaggtcgaccgggtcatcgcgagcgcggtcacagcgacgacgggcgtcggctgagcagacaccgtctctgagacggtctccgaagcgtcgtcgacgacgacggccggctgcagagcaggcgccggggtcgataccgtgaagggcggcagaggggccggggcagacgcgctttcgacgacaaccgtaaagtcgtcgtcgtcgtcgtcgttgtcgtcctcttcctgctcctccttatcctccttcttcacagcctgctgggcaggcgtcggctcctctgcaggagccgagctgaccggctgagcagcctgcacgggagcctgctgctcccaagccgccaccgaaccagtctggtcgacgtcggcctcgtcggcgatcgacgtcggcgggaaagcgatcatctggaggagtcgctgaaagtcctcgttcgaagggatgccgacgacgtcctcgaaggcgtcgctgcttgccgtgaagctcggcggggcgggtgccggtaccggaacgacgcggaccgagacgtggacggtgtcggtcgcgaagaagccgtgctggacgaggtgagcgagggcgtcaaggtcctcgtctgcgacaagcgagccaggcgtcagactcgaggcagactcggatagaagacaaaggctcgagaggactcaccgtcgtccaacatgacctcgcgctcgcccgagccgtcgagcaggtcgcatgcaaacgcagcgtcgaagccctcgccttccgccagtcggagcttgcggtgaacccagccttggaccttctcgaacgtcggttgctctggagaagggttgaggaggagacgaggggtcaggacgcggccgggtaggccgagaacaaggccggcggccatcgagggcagagtgggaggaggcgcgcggtcgatcaacatggcgggcgagacgtacgcgacagcaggcggacgaagcacgagccgtctggtccggtaaagacgagccgtggcgaggccatcctgaggtgtgcttgaggtgggatgttgtgcttgaggaagaaggaaggagggtgtgagggaagaagaggtggcgggcgacagggccttgtccttgcgtcggcggcgggggcgtgcgcgggccgggcgaaacaacaagggccgacgcgcgcgaatcgaaaggcaagcgcgtcggtctctcgagcagccgtgggcccgggtgggacgggagctgaagcacgaccgacgaacgacgaccctgacgcgtgcgttccagccgacagagcactcgagagtgcggcctctttccaagcaagagtgagatcggtcggcgggcggacggacgagcgagggcggtccctgcggcgaagactgcgcctactcgagctcgcccgactcttcgacctacacgagcgcgccagctcccgaccgcaatctcctctgaacccttcacccacccgcccatgtcgatccagccgggcacgcagcggatcactgccctccttggccatctgccggcgctcgaggcacccgtcgtccacctcgccggcacgaacggcaagggctccgtctcggccgtcctcgacgccgtcctgacgacggccgggctcgcgaccggccgcttcaactcgccccacctcgtcgccgtcgaggatgcgattcggctcggcggccagccgatcgaccgcgcgctctatgacagcacgcgagccgaggtcgagcgtgcgaacgagacgtacgactgcggcgcgtcgctctttgagctcctgacggcgacggcattcgttgtctttgcgcgtgcggcggtcgacgtcgtcctcgtcgagtgcggcatgggcggccgggacgacgcgaccaacgttttccggccaggccaggtgctcgcgagcgtcctgacgagtgtcgagctcgaccaccaggcttttctcggagactcggtcgagcagattgctcgcgtcaaggccgagatcgtccagccgggcggcatcctcgtcgtcggcctccagaagcacaacgccgccgtccgacaggtcgtcgagggtctcacagccgagcgcaaagcgaccgccgtctgggccgagcggagcctcattggctcagcaggctcgccctctacggcgccggctggctcgcagccggtcctgacgcctctgccgacgccgctcgtctacggcccgccgtttgcaggagccgacgtgtcggatgcgctcgcccttctccaggccgagctcgtccagctcatggaagccacctcgcccctccttgcagcgaccgacgatggtgcggatgacgatgacgacgccgatgcgacgccggcgaccctcctgcccgtcattgaaaacattgcccggctctcgatcgccgtccgcgagttctcgcgcgtcccacgaccgtggctcaagacggacctcccgctgccgggccagcatcagcgcgacaacctgtcactcgcgctcgccgttgtgcacgtcctccgcacgcagccggccgcgctcgagcgtcttccggcactccggcggctgaccgacgacgccgttgttgcccgtggcgttgcctcgaccgtctgggagggccggtgctcgtggctctcgctcagactcggaccgtcgaccgaccggcgccagctcgaggtcctcgccgacggagcccacaacgctgcgtccgccggcctcctgtcgagctaccttgcctcactcccttcgcgcagaaccagacgcggcaagacgttcatcctctcgctctctcattcgccgcccaagtcgccagccgacgtcctcgctccgctcctccggacaggcgaccgcgtcgcgctcgtcgagttttcgacaccaatcgaaggcatgccctgggtccggccagtgccaatcgatgagctcgtcgagccggtcagagcgctcgtcggcgacgaggcgcccatctgggccggcaagctcgaggaagcgctcgagtgggctgccgctcaaggccgcgaggacgaggcggcagacgagagcgggcaaggcctggtcgttgtcgccggcagcctttacttggtcgctgacctttacaggctcgtgtggcgtcagcgaggagaagcgtgaggagtcgagtcggattggcgattccgaggtgaactccgaccgcaacggcggaactgccgtctcctcgggccatcgtcgctgaccactgcctctattccggccgccagcgtcgttctcgagtctcggaaggcaagcgagaaggcgttgctgccaagcccaacagggctaaatcctcttggggcttgagctaaggaggtggcggtggaggcggcgccgtccggccggccgccgacgccgacgactgcccagcatcggccacggcctccgtttccgctcggcttcgcacgcgcctttgaccccgccggtctggtcggaggccttcccctctcgagtctttccgacccattactactctcgggaggctccggtcgacagtccatcctcttgcgactcttcccgaccggcccccgaccgacaatggtgagatgagccggagccatcgttgtccggcggccgccagtctcgcttgatcctccgtgtcacgggcaactaggtcatgtgtagggctgcgtccggaatagtagagcgagagcggaataatagagcgagagaaaggcggccgagaggcgagggtacaatgagaagttgcagcaaacgcgagtacagagagaggaagcacgagatgacggggcaaaagggagagttgcaacatgcgcggcacagaggggcaggaggggggcggggactgcggcatagcggggcgagagcggacgatgcgaaggagagggcgaatcggtcgagaagggagaagcaggtgaagtagcgacgagacgggaacgagagcgaacgaagagaacgaaaccgctaggctgaagcctagtaatactgaggatgggggtaggcatgcggaggcaggatcgacggcccacctaggtgctgatgctgctgctgttgctgcatcggcggcgcgagtggcatcgccgaggacaccagcggggtcgtcagcgacgtgtcgctcgccaccgccgccgccgccgccgccgcagcggccgcggccgcaccgcgctggctgcgctccttctttttcttgccgggaccgcggcgcttgatgacctcgtcgacggtgcactggaggttgcgcttgtcgcagttggcgcacgtcggccgggcgccgtcgcacctggtgtgggcaagattgtcagctcgacgatcgatcattcagaggccgcgaaggaagacgtacttcagcttgcgcttgcggcagaagtggcacgccagcggcgccttcttgacctcgcccggcttgtcggcgccatcgccgccggcagcggccgatggcccgccggccgagctgatcgcactcagcgagcgcttcttgctcttcttcttttcgccctcggcaggccgcttgccttgagcgacggcagacagcgcaggcttggcaagccccgactcggccgtctccgtctcaagatcggtcatggaggccattgagggtgcgatggtcggcggaaggatgctgttgttcagagcggcgctgccgctggcgaacgaagtcgagctgccggccgctgccggccaggccatgtggttggtcgactcgggaggcatcgtcgacgaggtcggcgacggcggctgcgtgttgaggtaggggttttgctgttgctgctgctgctgctgcgactgatggaagtagagcggctgcgagtcggtcgcgtaggcgtcgacgctgccgtgagaacgctcgaagccggtgccgctgctggcgccgtacgagctgggcccaccagcactatggaggacagacgtcgagtggtgccggggcatgtcgggcaccgattcgtccgccgaccggttgtcgaaggggactgagtgccggtaggccggattaaactggtcgtacgggttggagcttccgaagccgctggcgtaatcggaactggccggcgcgtaggccgtctgattgggcgcgaccgtggaccatggcgcgacgccggcctgctgcgactgttctggcgccacagcctcgccgccgtaagagccggtcgaggtcggcacccactggttcggtaggccttggaggccgagcgccgactcgccagcgttcgaaggcccggcattaaacgagctgcggtagttgctgttcgacccctgctgcccctggctggtgtaggagtcgtttgacgcaaacgcgcggtacgagtttgggtcgttgatgaagtggccgggctccatgttggcgaggagcgggtagttgtcgtccgactgataggccgtctttggcttgccgtccgggccgagcgtagacgggttcgggaaggcagcaataaggcgccggatgtctggatcgtacgcgaggcccgacggcgactgctggcggtcagccgcctgctgctgctgctgctggtcgccgtagagcccgcggccgttgccgctgccgatgccgttgttggccgaaggccggtgggccgggaatttggccgccatcaactgctggtatcgtgagagttcggccatgccctgcctgggcgacgatgtcgagttgccgtcggcctgaccgaggcgcgagtcggggctcgcagagggcaaggccgggctgggcgtcgcccaggcgccgagcgacgacgactgctgagagagcgagtcgccgaggccatactgctgctgctgctgaggcggcacgttggaggccatcgcgcccgtcggcacgtagccgttgagagcgaggtcaaagacgggatggtgggtgtcgtacgaagacgtttgcaggaactgcagcgggcgtgatggatagaaagatcgtcagcgagaggccgtcggcacagggagtacaaagaaggactgaccgccgagtacatgccgccgtccttgttgtaccagtcgctgtgctgctgctcgggcacgggctggtagatgagttgcgggtgagccgccatttgagcctggtgccgctcgctggagagtcagccttcgcccctggaacaccctgaccggtccgtcgtcgcgagaccagcaggttgggcgaaggcagccgcgaaaaagggaaaggaagagacgacgcacaacgtgttcctgggcgataccctgaaggacggacgatcggcccgtgccgtcgttggctgatgccgaggaccagccgccgagatcgcgcaaaggctggctcgtgcatgccgtcatgcccgagaacgacgaggacgagagcgtcgaggccgaggttggattcgagctcgaggccgacgaggagccggcgctgccctgctgctgctgctgctgctgggcctgaacggcgaggagggcgtttcgcatcttaagctgaacgagctgcgagtagcgcgagacgttgcgagcgggcgcggtgccctcggctgggttcgacgccgtcgacacggtcggcgaccggttcatcccgaaggaggacgggccggccatcgacgtcaccgacgacgacgacggcccttcggcgcctgagagcggcgggcggtgcgacatgtcggacgacgacggtggccggtcccaagaactggtgctgccgggaatgctggtgtagagcgggtcaagcagcggaggggagcagtagcgaggaaactcaatccggtggatgttgccgatgtgggcagacaggcgggcgtggagagctggaagtcggccgagccaatgaggagcaaggtcagctccgatgcctcctcaacggcagccaacgcgacgacagatcgacgagaggagaacgcacaggtcttgtcgtgctcgtccgggcgggagaacgaggacgaggtcgagagtgatgggccgggagtcggcgagagggcgccagaggcggcggggtcgtccttcgacgcaggagaaacgggcgggcaaagggacatcgaccgccggtcggacggacgaaagaagggtggaagttgccggagaaaagaggacgggagccgggatgagagagagagagagagagctggctcggccgtggactggttggaagaccggttgggttccggctgtgggcggagggcgggatgggggtcgagctcgcttttaggctgggtgcggagcggcgccgagcctgggcgtgggcgcgaggaccggggccgagagtgctgcttgcgaagggagcgagcgagtccggcggccgcggtcagctctagctgcttgctgggcggatggatgccctcctcctcgaggtagccgcagaccctcgccgggagagggaatgggccagcaggaggagcgagagctcgctcgcgcgggaagctcagagctcggaacggaccttccgctcagagacgcgctacgattcctcctgaggcggcgatgggcaccggccgacggactgacgaggtggcgtgcctaggtcgcccagcgagagatctgagagaagagaggagtcgccgcttgctgctttgtgctgcgatgcggccgggttgggcaagggcgacgagggcgcaggcgcgagctgccttcggccgatggggtcggacgagcgaaaacgcgggcgtttgcgggcagctgaagatctggagctcgggcaggagcgctgaaggcgcgccaagagaggatgctggccgtcttgtcgggcgcgatagcttgcgagtagtcgaggtcgtgggtgggcgaggaagggaagaagggcaggcgcgaatgcttgccagaggtgcggcacgacccgaccacgctgcgctcgcggcaagtcggtccctccgccagagctcctccttctcctgcggcctgggccacgacgcagagttcggcttcagcggctggagaatccgttcggctggctctcccttcggcctctgtgtcgcaggcgggttcgagaattgcgggggggggggcgtagctctccacgtgtctcacgcgcctgtcactcagcaacgcctcgcccaccaacgggccggcgtcgtcagcggttcgccctgtggctcgttcgccggtgaccacaaggtcgacggccagacgccgggctgaccagcagtagccagcagccatcagccagcaggcggggagaggccgggctgctgctgctgtcctctgcccgtctcgccagaagggagcgctccacgacagtcctccgcgagcaatcaccctcctccccttgtgccctgtcacgccctctgcctgtgactgactgctatttggcatcgacggagagaaagggactcgtcgttccggggcccctcggccgagggcgagggcaaactcagggcgtgctcgtaggcgcagcaacccgccgacggcccattcgcccgggacggtcgaggagagcgacgatggaacgagacaagcagcttgaccgtcaaggggctggccgcccgctcgtacgggcagacgtcgccgttggttcgtcgtcggtgatccggctgcaggccgacccaaagcgctcgttcctcgaagccgttctagctagccctgtcttcctcagctcagcagcgtgcgaaaggggaggagaggtggcgcgccatcgccgtgctggaccaaccagagcgaggaccgtgccgtgcagcgtccctctcttcgggccttcgtcggcaggacgtcgagagcggcatcagacggtactcgtccagagctggtttggtgggagggaggcgttcacaaccaaactactttagacgggcaccccaccccgcgaaggccgatccttgttgctccctccctctcttttgggacgctcgttcccttgcccttgctcctgtcgcgccagccagctggtcgcctacgtacgccgccgacgcgtgcgcgcacttgattcgccgcatcgcgcgctccttctcagcgcatcgcaagcgctctccctttcgaacgccttctgacctgctgtcaccggctgctgtccccaccgcggccccctgctcgaccggccgcgctgcgacaggtcacaggacgcccaggaagcgccgccttccggaagtcgcttccctttcttgcgtctcgaagaagcgtcgaggcgacatgcataaaggggacagtggtcgtgggcgggcaaagcgaggtgggccgtggagctggtgttatcaagggcggaagggtcgccgccaagccagaaggttggccggctccactccggccgcggagagtgagagtaaaagaggttgcggggcaacatgctagaggccgacgagggtgtcgagcggcggcgcgagggaggacggcgcagatgcgcggtgcgtgaagggcggcatcgctgacgagggcgggaggtcatctgttgtttgggctcaaccatcgacaaccgcgcccgcgtcgacgccagaaagcgccgacgacgattcggctgcagccgtcgccgtcgctggtgggtccttgacatcatcttcagcggtcggaacgccctgcaggaggtgagggcgtgctcgcgtcagtacgaggctgatcgcccatggaggcaacgcaggcacgcggcgcaccttagatcggcaggcagggcaggcgttgcggccggtcgagagccacgagtcgatgcagggctgatgctatggcagagagtagaataaggcgtcagtctgggcggtcctccagccgagagggaaatgagaagacgaacgtagatgtgctctgagggccgaaagaagagccagtggtcagcaaagagacgccggattacgggcggcgagacgcaacgcactgcacttcaagatgcggcagtcgtggtccgcctcgtagtcgtcgagacagatggcgcagcgatcggccgacgaagcgatgacctggccagcggcgacccgatctgcgatctgcgacccgcggatgacctcgagggcggccttcgagatctcttcggcagtcgcggtcggcggcttgacgttgccgataatctcggccagagccctgttcaagagatgggggctggtcagcgggtgaaggacaaagtctctcgcatccctcaacgcaccagagctcctcgtgcgtcatctggcccgtcagaaggcccggggcggtcaggatggggttgccgtcttcgtagcgtccgccaatgacccaaaggatgaagctctgggtgccgcgacgctgggcatcaactgccgtagccagccgctcctcggccgcctgcactgtcgcggcgtcgacttcagcccgagcccggtcggtttcgttcgacgccgacgagacacggctgcgaagcccgtcgaggacgcgccggacgcgacccgtcaggccctcgcctgcggtcgagcgagtcgccgtcgacgcgtccgacatgacagagtcgccatcgacatctcgggccgactgggccgagctcatccgacccatgtcagggtgtgtcactgttccgggcgttacaggttcggccgtcgcggtcggcctcgacgccgccgccaggccgaactctgtcgggatctcggcagcgttgactgagcgaacgccgacgacgatcatcggcgtgacacgacggagcccgctgtcgagtgtggtggcggtctcgcccgctgccgcctgctgagcgctcgcacccgctccgagggtctggccgctcggtgcgagaggaccagtcgtagtcgacgctcttgaggtagcaaggggtggccgaggatcggctgggacacctccagcggcggtcggcggccgcacgggcgccatctgactgggctgcagggtcaaggggagaaagaaaagtcaattcacgaagggggttgatccttcgagacaccttcaacctgatggaggagcggagtcactcaagctcggcatgaggaggagcagacgcacaaacctgtagtggaccatccagttaaggcttctcgggatgccgtcgacgccgccagtgactgcgggtcgtacgttgctcggggccgacgggcttgcgtcggctgctgagctcgtcgaccgggcctccgacgcgtcggcagacggatcggcagccgtgttcgcgctggcggctgcaccgccttcggcgacggtagcagtagcagcagttgcatccggcgacgggccgttgtactcacgcagagcgcggagcaggtcaacttggatctcgtccaggaatgtttcgaagctgtgaggcatcgctgggccggagcgggtcgacgagcccgacgaggtcgaggtcggggagccagctggagatgccggcgacgcgtctgtggacgggacagaggggtcggcaggaggaggggttcctgggcgagcggggttgaggccggcagttgctgttgactcggcgggcgtcggtcgcgctccaaactgattctccatgtactcgcgaaggaccgtctcaacactattagcctcgcggtttgcgctggatccttcggcttccggtccaccgctggctgccggggcgctggcgccgcccagcgcagactcggccgcggcagcgccgtgctgcagtgcgttgcgaatctcggctaagcggcgctgggcgtcggagctgagcgttggaggcgacatgccggcgtccgaagccgcagcagaggccgatggcgcggtcaaggtcgggacgggtggcccgatccgcgtcggccgcatgagggaagctgccgtcgcggtcgttgccacgctgaggagaccgccgaggagcgcagcttgctcctcggaagattgcgacggaactggggcggcgtccggggtcaatgacgatgtggacgctcccgacgtcgagcgggtgagccggctcggcaacgggcgaagaggccggccagccgtcgaggctgtcgtccccgagacggatgagatactcgagtcggcaggaggaggcgttgccggccgcgacgtcgtgacgaggccctggacctgcagcgcagagcagaagaacgggtcagctcgtccgcattgatcgcgcactgcagggaggaagtggactgactaccatgctcgtccctccacccaggccttggttaggtcgactcgccggcgctggagctggcggctggccaggtgtggctgctgtcggtgcggccgatgcagcggcgggcatcgacgtctgccgcggcgtcgcgacgttgccctggaggatcgagctcaaaaggtccgacgcccgagtggcctcggcgcgagtctgctcagccatggagctcggaccgaacgacgatggtgttgactcaatcggagcagcatccggcaaagggttgacgtacgcggccgtgccgaggcccgaccgaagcgactccatcgagacgcgctcgatcagccgagcggcccgtcgccgagggcttgcgagggggtcgccttcgtcgtcgctgtcgtcactgtcgtgcttctcgtcgttcgcctgccggcggtgtgccgcagtgggctggtcgatcggtgccgtcgagctggacgtgacgggcggggtggggccggctggcagccctggtcggtccgccggcgcgacgtcgacatcggtcggcgcaaactcgccgtcaaggaagccagacgagcgggtctcgggcgaccgctcgcgctgcttgcccttgtcagcgtttgtcgaggcagtggcgttggacgacgacgacggccggtcggagccggtggcagcgctcgtgctcgcgcctcctcctcgcgagctgagcagggtgctcagacgacgccgtttcgggtccttgcggcgcgggctagtgctctcgccgccacctgttgccgagccggacctgcgtgaaaagagggtgccgagagtcgagctgccggcggccgatggatcgtccgaagtggtgcgtgcagaggatgacgatgagctgctgccgccgccgccgcttgtagcagtcgtcgcggtcgagatagcgcgggcgcgcctccggccggcaagctgccgagtggggttactggtgctcgcatcgtcgacatccatcgagccgccgtcactggccggcgtcgaggatgtcgcgcgcgcagaggttgacgctccgtcagccggcgcagaacgaggcggtctgggccgcgagtggttgctgcccatgggcggagagttgcgcggccgggcgagtctggctgagcgacgaattgagttggaaagacgcgatggccaaggcgggttgaagggtcggtgcaagatgagatggatgcttgaaaggggagggtgcgggtggaggaggcagggcaaggagggggacggtcgcgagacgaagccgatgccaggccgcgcagcagcccggctcgcttcgcctgttgcaccagaagcacttctcgtcgcccagctcgtcaggagcagtcggactggtgggttgacagcgacagctgctcattggtattgacttcaaaatgctttcctgccaacaaaccacagctcctgagccggaaggcgagcctttatatcgacacctgcggcctcaatcgtcgtctcgaaaacttgtcgaagggcatgtttttttcctggcatcagcctctcctgctcaggcctctgcaactcagttatcaagtgtcggtgaccggcgacttgttcggtacccaggtgccgctcttttttgctggcggcactttcatgcttcagcatgcagccgcaaagaatcgacctgcaatgaaggtagaacgttctacacgttctaccttcattgcaggtcgctcgccacaatgctgcttttgggttgctgctcgagccgtcgtcgcttatccgcatctgaagtagtcgccagcagtgttcgctctcgattatgacccgtctcggcctctgcgctctcgatcgtcggggtttgcgggactcggccgacgctgcgcggtggggaagtcggctcggccatggcggcgcaagaacgacttgagaaggacagcaaagcgaagcgaccttgtgagagcactttactggtcgtcggagctcgccaggcgccactgactccctcgatgctcgggcatcggcgctcggccttgtatgctggctgctaccgccaggtcgggccgctgtcgtcaccgaacctcccatgcggcgtctcttttcgcgtcgggcgcgcgggaacctccgtgcaatcgactgagtacgcggcgagggatcggtcaatcgattccaaggttgctcagccgtctcttccgacctctcgaccagcaccctccctccccttcgagctcgcccagacccacccagctcggtataccccctcgtcgcccgactttcccagctcgcagcatcgctccagctcgctcggccccgtcgcagcttctcgcgcagccctccctcagcacgccacgtttcagcccgcgtcttcttccttccaacgaagccgatctttccgatggccaccgccaccgccgcctctgagctctcggctcacaagcagctctcgacggccgagctctatgctgagctcgcaccgatcgtcgtcgaccagaaggatcgccggagcaggttcagcaagtgaggccgctctcccgcctcggaagcagacctccggcacagagggttgatcactgcctttgctccctccgccgcagctgggccaagaccttcagctgccagcccttgactggtacgttgcgcagtcgcgcaggtctttcaacaagctgcagaccctggactgacgcgtccgctgccatcgcggctccctcaagtcttcttgccgacgactgaggagcagtgcgtgctcatcgtcgagctcgcccggcgtgagggcacctctgttcgctgcgctggcgccggccactcgccctcggacctggcctgcacgcagggctacatgatcaggaccgacaagttggatgcactggtcgaggtacgtcgcgtgcgctgcaggttggatgtgacgcgacaagggctgatgcttccgcacgttcgtcttgccttgctttcgcgcttcaaatcatcaccgtcagattgacaaggagaagtcagtcatcgaggcccaggcgggcatctcgctccacgcactgcaccggacgctcggcgcgcacgacctggccatgtcgaacgtcggctcgatctcggaccagtcgctcggcggcatcatcacgacggcgacgcacggctcgggcacgagctttcccgtcatctcggccggcgtcctcagcctgacgctgatcctcgccgacacgaccatcgtctcgtgctcgcgcgacgccaaccccgatctcttcctcgcgacgctctgcgggctcggcacgaccggcctcatccttcgcgtccggctccaggtcgagaaggccttccggctccgcgaggacgtccagccgatgcggttcaacgactttgtcgacgacgccaactttgcggccattggcccgagcagcgagcacacacgcgcctggtggttcccgcaggttgactctgtcagcgttggtaccgccaaccggacgtacgacgtgagtcgctgcgcccgccgcccattcgatgaggctctttcgttgatacgatttcgctacccctgctcaggcccccgacgccccgccttcttggttcgaaaggcagtggaactacctcgtcggcttccatctcgtccagttcctcctcttcatctcgcgctacatcccgtccttcacgccgcccgtctgccgcttcgtctggaacaacttcaatggcatctcgcggacccacacggacgagagccataaggtcttcaacttcgactgcctcgtacgtcggcctcttgtgtaccgaacgtcatctcgctcttctcgctgacgcagcccttgcaaccgagcagtttgcccagtacacgaccgagtgggcgatcccggcagagcgtgcgccggcatgcctgcgcgagatgagccgctggctggccgaggaggcggccgaccctgagggcatccgcgtccactttccgatcgagatccgctggacgtcggacgacgacatctggctcagcccgagctttggccgccagaccgtctacattggcatcgtccagtaccggtgagtgcacctggctcgactcggattgcctttcgagggctgtcagctgaccgctttgtccccttcttagtccttacggcctctcgacgccttaccggcgctacttttcgcgcttcgtctcgatcattagctcgcacgccggccggccgcactgggccaaggcgcacgacctgacaccggtcgagctccggcagctctacccgcgcttccccgactttgtcgacctgatcgagaagcgcgatccggccggcgtcttccgcaacgagtacgtccgccgtcacctgctcggcgagaagaccgaggcggtcgatgctggctgcttccgaagcagcggtcgcaaggggcagtaggaggatcgaccgtatagctagcatcaaaaggtggtcgggtcgcctcgcttcctttgggcgtccgcggcccgcccgccgcatacccctaatctcggaccggctcgcatcaaccagaggccgctgtctggtttcgctggccgcgtacttccctctagacaaacggcggcccgtgcagcaacggccggaccctcgaccacgcgcacttagacgaactgcgcttcaaggattccaccggcctgcccccttcctaccctcgactgctgtaatcctcgctcgtgcgcctgtcctatcgctctcctcccactagtctcccgtatctctcgcataccgacccttcacctgtagcttataactctcacctctcgccccgccagccatctggcccgccccggatctcgcatgccctccgcgcctcgccgcagacgaccttctctctgtgttcgcagtcagcgccagtcatgcggggcttagaagcggcattgtgtcattatcatcagctgcggtcggacgacggtcgagctggacgaatcgctgtcgcctaacgatgaggcatcgctgccgtcgctagacaaatatgaagtgctgtcgtcttccgacaatgttgtcgagtcagaagacgttgactcgggagaagagggcggtattgagaagcctgcggatgaagtaacgtcagtccaggtcggttcatgtttcgcagaagaaggacgtacggtcatccagcgcaatgatgcggccgatgccgtcctctggcggaatattgcagccgttattcttcagcttgtgaaggctgaggcggaggtgcggcagtcacgcaagcgagacgtcactgtcgtctgaggccgatggtgagggggcgtctaggagcaatgaagggtcggccgctggtcgaagtgctcatccttcgagcgagaggggcgcaccgtctgcaggctcgatagtccggccgaagctgtcctccagcacgacattacgaccgttgctttgaagcctgcgggccacgtatctttccaatttactcatgacgccgccatcgagggtcgagtcaagacacggagggacaatgacgcgcggcttgacgaggtcggcgaagaagaggaccagcccttcgtcgtagccgttggtgtcatggagaagccccccggagtcctgcgatgcgcatggagctcgtcttgctttgcctgtgcgtctggcggccagccggatgaaaacgaaagtacattcgcacagcacggtggaggcgcacagggcaagggagcgatgaggcaggcgagcgacgcctgcgatgcaaagtgaggtgatgcgatgagcggggaagcaaatgatgaggaagggcgaggctggctcgatctgcgcggaaggtcaggctagatgccatctcgctcccaccagcctcgaacggcgaacttgatgcctaggtacgccttgatgatcggctcgaggactggcacccactgctcctcgatgtcgtcgtttagggcgagcgagacgacgctcggatccgtcgtcaagcgttcgacgagctcgccaaattccgtcggcgacgaaagcctggaggatgagggataccagtatgtcagagtcgcgcatacagaggtgtgagacgcagagacgcacatcttgaacaaggcgtttgtgcctgaattgacgtattggtagcgggcgatgagctgaagtgagtaagtacgcaggtcgatcggccgcagagggtcggacggatttatcgcggccaggacgtcggccaacgagaaggacgtcgtcaaaaagtcggccgtcaagggcatgtgaggctgctgatcttgcggtacgccggcttgcgggaggctctcggcgacgtcggtggggaagctaaagcttgagccgttgtcggggaggagggccgagaggccggcaggcccagacttgccgacaatggcggccagtactgcaatagcaaccaggggggattcaagtactgcaaggacgaaaaatgctaaggaaggacctacggcagtcgccgcacttggtggcctcgccgaaagcgagccgcgcaaacatctcggaggcgtcgaccgtctgttcctgacccgaccaccagccgtcgaagcagtggtcaagagagatctcgcacttgttgtcgacaaggggcgcaaggtagccgtcaaggctcgctgccgatatgaggggcattcgagaaagccgtcagcatgcagccatcgggcgagaccttaggaggaagggccgcgacttacaccaggtcgggtaagtgctcatctgcccctcgatgccgaggccggcaaacccgtcgtccgtgattgaccgatcaagcgtctttcgtttcccagacctgacctgggccgtggctgactgcgagggctcagaggaggcgaccgcgtgcgagccggcgtcaggtgtaagcttcagcaagctcttgatctcctctcgctcgtcaacaccccagcgtccgtcggttccgccgagtcgggcgacggcccaggtccaaagcatggcctctcgggcgcgctcgatcaggaggtaggaagagagccagcttgggttgaggtcgccgtacttgccgctcgactgctcgcggaagcgcctttgggcggcggaagcaaattccgttggccagagggcgtgcatctcggccaaaagtggccgtgagagcgtctttgcaacgtgctggagaggcagccgagcgcggtggccaaagcggcgcgagaggagccagtttgaccggaggagagacgaccattcgtggtcgcatccgacggcagggtcctgccaatacggaatcgtgtaggcccacgggtcgccgagccgcaggttgacaccgagcaagggcgagctgaagtcggccttcgtgtgcggctgtgcagaggggagaagaacagtcaggtcggcgatcgttgagcccgcgcaagatgaacgggcggacctggagcagaaagaagtcgtcgttgaggtagacgatcgttgtcgccaggtcggcaccgacgtcgatgttatggagcatggactcgatcgcaaacgagttgaacgtcggcaaacttgctcgaacaaaggcggcatgctcgtcggccgtcgttgaggtaggcgttcgaaagatctccgagtgatggtggacatggatgacggtcgcactgccggcgccgtctgtcagagcctccaagcggccagtctgagcggcatcgtctgccggggccgaggagcggttgcggccctcgttccaagctagccagccgggaatctgcccgcgccgcccgcctggtatcgccgacttggattgatcctcccagtcgccgaggacgagatggacccggctgggagaaggcttgactttggacatgacggacctgagcgagtgacggagctcgtccttgtccgaccctgcgctcgcgagcgttcagcagggtgagagcacatcagctgctgttaaaagaggcgtcaggacagcacagcaaggccgcacggtaatgccgcgccgagggcggctcgggcgagacctccgtcttctggagatactcagctcgttgatccttccaacggggatccgatccgttgacccaggtaaagacgacctgcgagcggagagtaataggctgcgggtcaggtgtcgtgagcgcggcgcaagggacagggtgaatcgcacgtcaagccccattcttggcggctgatcagactggacgagatcacgcgagcaaggcacgccctgaccgacccctgtgagcagaatgaggatcagcttatacggggtagaggacaatgcgaaggcacgcacatgactcaaggcaccggtcattgaggatctcgacaggcaggacgcctgaccgacccggagctgtccgcatgtcgaggaacgccggagcggaaaaccgtcggtagaggctgcgctcgacgaaagggtcgtgaccttcggcagtctccttggcttccgactcgccgctcgacaaagaagaagcccagctgagccagatcggattggaaggcgccgacggccgccgccaaggaagccagatgccggggatggcttccgacgctgctcggctgagatgacctgttactgcaggagcggttgccgaggctggcgatcgaccgagcagttcaccccggaagacggccgccggggccagagcaagcaggactgcgagaccgaccaatgacaggcaaaggcggctcatccgtctgaccgaccacctccctgaggattgtcggctgaatggcttctcaccgatctgctcgagcgggtcgaccttctcgcccggagtcggttcaggacccgagggcgacgaaagcctaaacaggtcgttctcgttgaagagcgacggtatcgattgttgctcatggcgctggatgcggggcccgtcgaggagagcgcttcggctcgagccgcgctgatgatgcggcgaggtcgagtagccgtcctcgccatcgagcccgagatcgtcgtcgtgctcgttgccgtcgtcgtctgaccgaccggtcccgaacatgggtgcgagcagggcgagcgacagctggcgaggaagcgagagccggtcaggcctgctactggtccgccgtttcgaaggcttgccgagactgctgccgctgctgctgggcgagccagcggagttggccgatcgaggtaggcctttctcggcgactgggccgaggatggctttcgagaggcggcggggcaagactaccaagtcgtgcagcgacctgagcgagaaccggcggatggagtgcatgctgacgagcgggtgacgagcgagcctggccggggctaggggttgagagaccaggttgtgtagatgcgaaggccgaggtgatcgtgcgtccgagcaaggaggtcgcagcaaacggaggaagccagaagcaacaggagcgccgagcagccttgtgagggagcttcagatgaggacggaaggtggaagaagaacatgccgcagtcctcgccctttgaccccatatggctgcgaccgaggtaaaggctgctgatgcacaggcattgaccgagatcgagcctgtcgccggcggtcaacggggtgctcggccgcgtcagcagcgaacggcggttggtcagtgaaagcttgttcctctagccttaaccgagacgcagagcgagaagcacgagacagcagccacttgtgtgtctggacccgggaaggccgaagtggagacaaagaggtgctggtggtcagagggcgggcgggagcgacgccacgggttcgaacgactgaaccagactgtctctcgccgattgctctccggcctccagaacccaatttaagccctttagctcgagcagccaccgggagcggaccgtcgttccggatcgaagatcaagccttgtccaggaaggacgaaaaggagaaggagctggtgtcgcagaacgggagcacctgcggaaggtacgtggatgtcgaacaacgtctggaggagcgaaccgccgacacgtctgccgctgctgctgctgcgcgagcaacgactcggcgagcctctgcaagaggcaggacctgcatgccagcagaaaatctgtctcgctccgccgctgatcgctggtcgctgtcgggcttcccagcctgaagggattgcaatcaggtctcgagggagcctccttgcctaggcacctcgagaggggagagcttggcaaggcgacccagggtcggcctcgcgcgcgtgctcaaggtcggcctttcatctatcagacgtcaagactctctcagaagcagcatgcggcttctcgtcctcgctgccctcttggtcctgctcgagctgagacgacgacgacgacggttgtgcgaggggagggcgctgttacgcccagacgagagaaggtctattacggccagatgttacgcctatcggcgcgggcgcgtgctgcaggcccagccctctgtcccgcctcgaggccgcctgcctgcctccctcaccctcctcgcccttcctcctcttcctttcttctcctctccttctcttctccatcgccgccagtccatgggcaagacgacgcgggcgtcggccgcctttaatggcaagggccgcgacaagaaggccgtccatggaggtacgtcgttcccttcgtcgtcgcgaggcaggcaggcggcccaccaccgtcccgcgggctcccgcctcgccttgccctccgcttttcgagccttctccctctctcgcgcagcacacgaccggacggctgacctgcccctcatctcctccgtcaactccctttaggccggcaaaagacgcggagctcggcccagagcggcgacctgcttgatccgcgcgagagcgagcgcaacgagaaggctctcaagagcgcggttcgtctctttctcctttgatcgcgctgcacgcgcgcgcgcgccctcggccttttgtcccggcgcgcgtccgtcgttgcgcgagattcgacgagctcgcgagcgagtcttgcctcagaggggacgggcaggcctacatcctgcagaggcagagagctgccctgcgatccttgctcgtgtcagcctgcagctccagctgggtcgagagctgctcaggaggctgactacgcctcttgccctgcccataacgccgcgtccatctcacaccgccttctgcctcgatctcccgccgaccgctgctgcctgcccctttgcgcctgccggaccttctctcgaccgccccttcttctggctcgcatcctttgccgctctccccgacgcaacagctctcgagcatgggcctttacgccgctcagacaaaaggtgcgtcggcttcctcctgcttcttctcgcgcgcgcgcgcacctttcctccccttgcgaccgaccgtcgcacccgtcccgtcccgtcccgtccccttccactccttccgtccatcggctcagttgctgcgagttcctcgaccaaatggaaagctgactcacttgtgctgcacactcttcaggcgacggcaactgccttttccggtgcggctgctggtctcgcccggccgtctgcctgcagacagcgccgcggctgacacatgcccgaaccctctttccttttccttagcgccctgtcggaccagctctggggccacgatctctcgcacgcctggctccggcgcgagatctgcgcctacctgctcgcccaccgcgagcggtgcgagaactttgtggacgccgacggcggtttcgacaagtacatccgcgacatgcagacgaccggcacgtacggcggccacctcgagctccaggtctgcgcatggcttatgcgcgtcaacatcaaggtcatccagccgacggttcgtcaccctgttcgcgtgtctggccgcccacgacagtcaagctgacgtcgcgctcgcttcttctcgctcccagtccgtctacatcatctctccatcggacgagtcgccagcttcagcatccactccttcaatctctgccccgccatctatcgcatcaaccgccattgccgccgagcctggtcagccggggagctcgacgccgacgacagcaccgagctcgccttcatcctccctgtcgtccttgacgccctcaccgcctcccgggacatctgtggcgacccagccgcctgcaacgaccgctgccgctgttcctgtcgaggagcctccggctgcaagcagctcgaccgtcaacacgatctacgtcgcctaccacgcctacgagcactactcgtcggtccgcaacctcgccgggccaaagacgggtctgccctgcacgcgcgagattgagcgcccaccaggtgcttcggcctcgaccggtgccggttcccgtccagggtcagcagcggcgacggcgacggggagccggggcggcgagtggaaggccgaggacgccgagccggtcccgacgaacgaggagatgctcgtgctttcctctcttccaccgtcggctttcactctggccgacatccgtcgagcggcggccgggctcgagcgagccgacccgcgcggagagccgccggcgtgggagtcggtcgtcgagctcctgctcgagcgcttcgaagcgagcgggcctgcctcgtcggcatcgagcagcaagacggcgtggcgtgaggtcgatggcctcgccgggaccgagtcggacgcctcaggccggacgacgacggctgtcgctgctactgcgagccgcggcaagaaggcggtcgtcagctcggtccggggccgcggtcgaggccgaggccgaggcaagtcacgcagctcactcggcgtccgtgtcgccggccgacgagccggcagcagtcccagcacggcctcgagcagcgaaggtggcagcagtggcagcatcctgcacgactacccggcggaagcggcaccggcggcgactcgctcgacgacaagttcactggcgatccctagcgccgcagccggagatcacgacgacgacggccacgagcggtcatcgccgtcgctctcgcctccgcccgacaccccgcctgcctcgccccttataaacggcgaagcggctactagcgggacctcccgcgtccggctgaagcgcccgccgccttcctcggccggctcttacacgcaaccgccgacgctcgatcggccgggcaaggagcgccggcgcgagcgcaaggcgagggtcgaccaggagaaggccgcccgacggtcagcaggcgccgtcggcgtcggcctgcggacgaggagccgagcgtccgctggcccggccgagaaggtcggcgaggttgagggcggcatgcgcgagatccacatctagcgtctgcccgaccgacagggcagccgtcgtgcctcgcatcgcctactctctcctccagcttgtcatcgtcgcgcaatcgaccccgacgctccctccgacggcctctccatagccctacttccctcgccggctcctccccccccccttcgcctctgtcccgagcagcttcctcgtacagcttgtagatttcctttcactgcatcatcaccgcctccttgtgtttactttccctcacgccgtgcatcccctctcctccttcatcgctcggtcaacccatccacagcattgcatcctcactcctttgcatccgcctccccccacacgccgctccgacgttcgtcttcttgtaacccacgcgacacgaccccttgcacaacctctcgtcatgacccttgcaaccgccatttctgaacgaagaagctcgcacggacagccggtcacgaggggtcgtcgctgaggctcaagacgatcgcaagacgtctcgaggcaaaagtcatggagagcagggcaagatgtcgcgaacaagcatagcccccaaagcgccctcatgcaaaggtcccctttctggggcgggcgggaagcaataaagtccggcggaaaaggtttgctctgcgcacccgccgtcgagtcggacgcccatccctgacctcatgggagtggaagagggggagggggacgcctgggggtgcgaggagaggaaggtgagtgtggctcgtcatcgacggccccgccgttcaaactggacgaggaagccgtccgacaaggagggtagaaaggggggggatgtatccgtcgggcccttccgccctcctcggagagaaggacgggatcggatgcgatgtaaggcgctaaccctcgggaagtttgcggtctgctctggccgctactttcccaggtcggacgcctatgggtgaaggcgccgccttggatattgaatagggcgggggtgagggaagaggagggggagaaggatgaatgaggctggcagctcaggttagcagaaggagaggggttcaagagtagagttgacacctggccggcggcgagggcgagccaggcggcaagaggtcagccctcgcaaggcagagaggaaagggagaggagagggaggtccgttgttgggggagaaggtcgaagtcgaaagctcgagccgacctttgaggcccgccggccagagctagggttagatccgcgcggaaaaaaaaggagtgcagtgcagatgccattctcgctgctgctcgtgcgccgcccgcccggccgccctgcctgcgaaaattcgggctgcccttcgtcctccctgccctctgtcgttccccccctctgcaagtccaacccccaaacttcacctcaagtcagactccgcaagaatggccgcgtgcgtactttttcaggcgcgagcagtcttttcggcagtcctttctcagcgttgctggctgctgctgctgctgctcgcgcgctcgccctggctcgtccttgctccgaccagtttcctgaccggcctccttcctttcctccggcagccgccccaccgtctcgatcttctccgagcagggagagtcctccgggtcgctccccctccccgccgtcctgacggccccgatccggctggatgtcgtccagcaggtccacaagtcgatggccaagaacaagcgccaggcctactccgtcgcctccaacgccggtgagcagacctcggcccagtcgtggggaaccggtcgcgctgtcgcccgtatccctcgtgtcggtggctcgggtacgcaccgctcgggacaggtgcgtctttccgattgcctttggcgtgtcgccgctttggcaatgctgaccccgttcgtcttccggttttcacctcgctaggccgccttcggcaacatgtgccgtggtggtcgcatgttcgccccgaccaagatctggcgcaagtggcacgtgaagatcaaccagaaccagaagcgttacgccgtcgtctcggccctcgccgcttcggctctgccctcgctcgtcctcgcccgcggccaccgcattgaggagattgaggaggtcccgctcgtcgtctctgacgctgccgagtcgtacaccaagaccaagcaggctatcgcccttctcaaggcgaccaaggcctacaccgacgtcgtcaaggtctcgaactcgcgcaaggtccgcgccggcaagggcaagatgcgtggacgccggcaccgtcagcgccgcggccccctcgtcgtctacaacgaggacaacggtatcgtcaaggccttccgcaacctccccggcgttgagctcgtcaacgtccgccggctcaacctcctccagctcgcccccggaggtcacctcggccgcttcgtcatctggaccgccggcgccgccggcctcctcgacgaggtctacggtaccttcgacaaggcctcggccctcaagaaggactactacctgcccaccgccaagatcgccaaccccgacgtcacccggctcatcaactcggacgagatccagtcggccctccgtgccggcggtcccaagattgttcgccgccccttctcgcagaagaagaacccgatgcgcaactcggctctcatggctgcgctcaacccctacgctgcctcggccaagcgccaggccatcaaggtccagcagaaggccggcaagggcgccgccaagaagtcgacgggcaaggccggcgaggccttcctcgagaccctccactccgcataaatcgcccctcgggtgatttgtgctttgtggcctgtcttggggcagggcttctcccaccccattcttttcggagagcccgcgaggtgccggttgtgctgctactcatggcccccttgcgctctgaaacttctgccatcgtgcctcgttgggttgcgcggcttctttcccgcgagcacttgccgcggcctcgccccctttcttgcgctcttgcacgcgtcttcagcgtcagctcctgttcagcctgccagtgcatcccgagcgtctgcgaactaccttttgcaaaggctcgctgcgatcagtctcgaccttataagaagggtcggaggctttgtcttctgctccggcgggcgcgcgcgccgaacccgcgacgcccatctcagcagcagcgaagctcgactcgccgcgtcgtccgtccgtcgcctctctcccgtctctctaacctcgctcctcctcactcagcgcttaagagcgtctgtctctccatcgcaggacgtctccttccgtgacggactagcgcgaccctcttctggccttctcctttgccaagcgccgcgaggccgcccgagacccgaccggccatgtcgcacgccctcctgttcgacgaaccgcccctccgaccgtctcatcccccgtcgcctgcagcctgacgcccctcccctctgctcgcaggcttcgactctttctctcgccctacttttcggtccatgtcgcgctccagtacctcaagacgtacccggagaacatcggcatcacgcactacctgacgtcccggctgaggagcatgccgacgcgcgaggtcgagttctactggccggagctctggtgcgtcgcctcttcttctctgatcggctttcgcttcgtgctggtctgaatcgagccaagcaagcgagcttgcgtccgagatcgcgtcgcatgcgccacgactcgtcctgacccgaagagcgagctgacctcccctgggctgcgcacgttacgcgctcccgtctcactctctcctagccacctgctcgtcacccggccgagtcgaagcgtcgccctcgagcgcttcatcctcgaccgagcagaggaaagcacgcactcggctatgctagtgcgtcctgcgcgggatgaacagctttcggcgaacggagctgacgcgccctctcgcgaacgacttccctgctaccagacattctggttcatgcaagccgcgctttgcgacctcgcgcccgaccgagcgctcaatccgcagccgttcaatatctgccagcgcgtcctgctccagtgtcacgagatcatctttgccgacccgccggcgccgttggcccggtcgccctactcgcccaggcgcatctcgctcgacggcgtccgcaacttgctcacgccctcgtcgtcagccggcagcgaccggcagcgccagaagctcaaggtggccaacgtcgaggctgtcgtccttggcctcggcttgatcgcgggcgccatcggcggcgagcgtgcgctacgcgacatgcgcgaggtcgccgtccttcagggctcgcgcggcggcgagccgaaagagtcgcttgtcgctcctccagaagagaatggtgagggaggctctggcggagtcgacgggccgacaaagatgacccgccctgaccagcagcaggaccggtcgtccgccgcggctgggcttggggaggagagtgccgacggctcgttcgaggagctccaaccttcatcggcaggccgatcgaccgacggaacggtgacggcgtcgcagtcgggctttgcctcgccagcattggccaagcggccgacgttcctcatcacggacgacgactcgcgcgcgtcctcgccagattccagcgtccgccttccagcagcgacgagcccgtcgctccccttgccgccaagtctgctccgccagcagtcgacgtcggatcccttctcgcagctcgaccttccgattcacaccctctcctccctcccgtcggcactgagaccgaaaccgctcgccccgtcgcactcgaccccagccttgtcgtcgctcggaccggtcgtgccagcacgaaacgacccggaggagctgctcaaggcatactcggtcaaggatcaggagcgcctgctccggagccactactgccggagcgaggtccgcttcctgattgctctcgaggagatagccaaccggctgctcgtcatcccgaagccggcgcgggtgagcgccctccgggccgagctgacgagtctcaaccacatgctcccggccgaggtaagcttcacttgctcctctttgcatcttctcggcgccgaatcgctgacgttggtttgctggcgcaggtctgcatgccgacctggtgcgagtcagatcacgggcacgaaaaaggcggtgagactgcctccggcctcccgctcaaggcccgggcatctttctcgggctcctctccaacgcacaaggcccaccaccgggtcgtccgcatctcgcccggcgactcggtcgtgctcaactcggccgagcgcgcgccctacctgatccacgtcgaggtcctcacgggcgacctcgactttgacccggccaagcgcgcaaatcgggacctgctgcgcaagattgtcagcggcgaggagaagaagaaggctggctttggcgggaagggcgccggcggcattggaccgaatggcgtcgtcggctttggcgccccgctgccggatccgctgcacccgctcgctggcatccactctggcgcgcctgatcaggaagacgcctcaacggtccccacacccgagccggcggtcgaaccttacgtcctgacctctggagcggcggcatcgacgtcgatcacgagcccactcgtcaacggctttgctggccagaccgagccgctcgacgacggcgaggaaatggacctcgtcgagcagatctatggtgccaacgtctcggctgccgacatcgatcccgagctcgagcggcgcgcgccggccgacctcaacccgaagaacaaggatattgacctcgccgtctggtcgcgggcgatggccatcgaagaggcctcgtcggccaagggtcgccgacggctgccaagcttggctcagcacctaccgccggtgccgtctggcgacgtcggcagcggcagtctttcgacttcccgctgggctgagggcagcccttcgggcagcggcacggcgtcaccgactgtcgcggccggcggctctccctcggtcaagcagcgtcagcggtccttctcgcacgatttgaggagcgttggaccagcgcaggcgacagcttctggctcgaactcgcgcatgagcctcgacccctccaggcgagagctctcgctcgacgactactcggatcggatgcggactgcagcgatcatgctcgctcagctgagcgcttccgcccaggcggctccggtgccgaccaagccgagctcgtcctcggccgcgtccgggtcggcggcaccgagcccggctggtcgctcgcgctggctaccatcccttccgacgcccaaagcagcgcccaccccggatcccatcacggccggccggaaacggctgccgccggccgaggccgagaagattcgggagcgaatcatggccgagatgctcgccctcgaggaggagcgcgtcgagcgaatgacggagaaggtcagcgaagccggtgctcacgccgggcggccgatacagggggcgcccaagccgatggaggacgagagcattgtccgcagagagctcaacaaggcggatccgtccggttcgtcctcacgactcctccacttctttttctggacgcatctgacttgcgcgaccctcccccttccagccgccgtcttctcggaagcgtggtcggccaagaaggcgcgcatccgtgcctcctcgccgtggggccacttggccacctgggacgtgcgttgccgctgcgggccgacgcctatgttcgtccgcctcgactgacgcgtcgttcctccctcgacaggtcttctcggtcatcgtcaagactggcgccgacctgcggcaggagcagctggcaacgcagctcctcgagcgcttcgttcgcatctggaaggaggagaagtgcgcgtgctggatgcgctagtgagtctgccgaagcggaaccttcctcttatctctctgcattggctctgacgcctctacttctgcctgggcagtttccgcatcctcatcaccggcgacacgtctggcctcgtcgagacgatcgtcgatagcgtctcggtccactcgatcaagaaggccgagtacgctcgccgggtcgccatgggctcggccatcacccagttcagtctctacgagcactttgtcaacgtgagctctctctctctctccctctcatctgtgccgccacaaggcttgtgacgctgagcctgttcgtcgaccccgtcagacctacggcgacccgagctcggctcggtaccagcgggcgcagcgcaacttcatcacctcgctcgccggctactcggtctcgacctacctgctccagatcaaggaccggcacaacggcaacatcctcatcgaccgcgagggccatctcatccacatcgacttcggtttcatgctgtccaacagccctggcaacatgggctttgaggcggcgccgttcaagctgacgatggtgcgtcgactgccagcagcagctcagcccaagtatctcgagactgaccctccaagctcgcccttacaggagtacgtcgacatcatgggcggcattgattcgccgggtttcgccatgtacaagaagctcttcaaggagggtttcaatgccgcgcgcaagcactcggacgagatcataagtacgtcacgccgccctgttgccgttgccgggctaaggctgacctctttctgcaacccctcagccatcgtcgacctgatgcagttcagtgcgtacgactcctaaggccgcgctgctctgctggcgcttctgctgaccatcttttgcggcgcccgtcctcaaagattcgaagctgccctgcttcacagcctttggcaacgagacggcccagcacctccgcgagcgcttccagctcggcctgacgcagcaggcggtcgacgaccacctcgagcggctaattgttaactcgatcggctcgcactggacgcgcctctacgactcggtacgtccttttgcgcgaacgctgcgtggggagacgctttactgacctccactccctctcgaccccctcagttccagtaccacaaggagtccgtcttcttctaggtgtcacgccgcggcgggttgcagcgcgaggcaatgggcggtcgggacgcggcccttcgaccggacgagcaccgcggtgatcggccggccgtgcgagagatctgctagaagatgtcggtttctcgacgcgagtagaatgatcttttcttgctgggtgcgatgggctcgtcattgtcgtcagagagcgaggggacggagcaagcgagcggaaagagggagtgcggggggcattgggctgggatcgtgaggcgctaggatggagggaaagggccggatgagaaggtatctagagtgtcgcaggaagaaagacgacggaacggatgcaagggatctgcgaggccggagtgatgagggagggatggaggaaatgagagaaggggacaccgtgtctagtgctcgcggctggccgatcggtggcctgggatatggctgcccttcttccagaaactaagcttgcggccgagagcggcgccggcgccctccttgtcgtcaccgccgccgttgccgtttccgattggcggcgtccggctgccggcggcggcgccgaggagacgcgcgacctccttctcctgggcgaggccttggggcaggcgtttgctcggcggcaggacctctggagcggtcggtggaggtggcggaggcggaggtggtggcgagggcggcagcgaccctcgaccgacctcgaggccggcttcctcgtcagcaaacgcgcttgagccgaggccgtttgccagccggtgggcgcggagggcctcgcgcacgcgctcctcctcgcggaccttcttgtgctcctcggccgcgtcgtagatgtagagtactggcttgggcgggacccagccctcctggagctccgggtcggcgtccgacgacgggatcgagccctgccgctgctgcgaggtccggtcgtcagccgtcttgtagatgtcgtccgggtcgaacgcgacgtctggctcgagcgcttcgatcacccggcgcttgccgagcgctttgacgctcggctgcgagagcggcgcagagggctcgtcgtcgctgttgtcggcagcagcgcccgcgccagcgccgacgggaagagtcggcgtcgcccgaccgcctcctggaatgggcaagggacgaggtgctgggctcggagcgagccggctcgggtcgttcggccctctcggctcagaagccgccgccgccggcaaatgctggctatccggcgtcgcaggcgaccggagcccgatcgactggaccgaaggcgacctgccgcccgagagacctccgacggggccgagcagctgctggccgccattgatcccgccgtgcgaggccgcgtcgtcccatagcgctcggggtgcgggcgagggtgagcgcgagccgccgacgacgcgtgagacgccgaggtgagcgtcgaccggttgctgcgaaggagggagggtgtggcaagagcgtcagcgaccggcgacagcctcaactgtcccgcgacccgacgataacgcaccgagcgatcgtgcctcgtctctttgcggcttcgctcactgacgagcgcgagctcctcggcctcctgcttctcgcgctcgagctcgtgcacctcgtcgatcgcctctgcgatctttgacgtcgcgtcgacaagcagcctcagcacctcttgggcctttgtctccttgtcgccggcaccaggccggccgttgacgagcgagctgccatggtcgttagacgaaggcggcggcgacgagtcgacgagcgactggccggcggtcgattcggcccaggggaggtggttgacgagctcgccctgaatccggacgcaagcgtcatacgaggcctagccagtcgcccaaaggatcaaaagacgtcagccgcggcgccacggcatccagggcccactgcggggacgaaccttgaaggacgacatggtctcgtcgtcgacgtcgacgcccatcctttgaaggccgccgacctcctcagccgcgccccgaagacgcttcgccgcgcggttcgcgccctggcactcttcctcgagccggaggaggtcgtcgtcgaccgaggggagggtttggacctggaaaccggtcggaatgtggtcgtacgactggacgggcggcggcggaggggccgcaaaggccgtctgcggctgctgctgctggcgctgttggtagacctcgaccgccatgggagggtcacccgcaggcggcttatactggttgtgctgctgctgctgctgctgctgggccggctggctcgctattggcaacgggtacggcgtctgcctcggcccaggcctagccgtccgtccctcgcgatactcggcgatgtaagccggcggcggctcctggacgatccccaagcctttttcggcctcccagacgcgaacaaaactcttgtcgaggtcctcactcccttcgtggcccctgaagcggtcagcgaggtcggcgaggacgtggtagagctccttgcgctgctcgtgccgcgccgggagcttacggatcgcagtctcgacgagagcgcagaattttggcgtcgagcagatgcctacgagcgaccggacagtcgagggagatggcgagtcagcagaaagcaaccccccgcacgctgagctggaggaaagcaaaaacgcacgcaagacggtcgcgtcctcgccccagagcataagccaccaccagatgccggcgatgccgcccccgagcctccggccgccgtccgccgcgccgggctcgcccttctcgcgctccttctcggcccgcttgacttcagccgggaggtccttcagctctttgcgaatgcgccggccgacgcgctccgcgagcttctcttcgtcagcgaccggcggtggcaggggctcggccgtcgagttgttggccgccgccgccgctgttgacaacgacgatgagggatgggcaagccgccactttacgtcctggaccgtcgtcgtaaacgccgtccgctcgctctccgactgcagcacaaaaggtggcagcgcgcagagcatcccgacgagccgctcgagactgtcgccgaccgagcctgccaacggcggcgggccggaatcgatgccgggcgtcgtggcgggcgtggggcggtgtgagccggtttggtaatgctgatacccaccgccgccgccgctgccgccgccgtcgggcccgtcaaacgaaggccggccgccgtcctccgaaggccgctccttcccgccggcaacggacgagagggacgacaggaaggcgccgagcttcttgcttttgccgccggctgcgcgccagtggttcccgccgccgctgccgtccctgccgcctccgccgccgccgtcgcgcgtcgaggacgggacggacgagacgaaaatgtcgggctgctgctgaggctgctgctgcgaatacgtcgggtaagccgaccctcccccggccccattaccgccgctgttgccatccgccaggaacggccccggcaccggcggcgtcggcgaaggataccgcaacatcggctgcgggtacgccggctgctgttgctggctgagcccgtcgtgccactgctgctggtcgcgtggggaggggggcgggccgagcggcggggcgtaggtcgggccggcggcggcggcgggccggttggttgaaggctgtggctgctgctggggcttccgaggagaggcggacgaaaagggtgctggtggggggggtggaggcggaggaggaggctgagagggaggcgagccatatgtctgttgctgctgctgctgcgccggcggaggaggagctgtgttcgcctgctgttgctgctgctggtgttgacgtccgccaccaccagcgagcgcgggaccggcgccctggcccgtcccgagcggtgcgctgtccgacctctgcctcccactcagccctccagcaccagcgccgttgtgtgatgatccgccgagaaggggcacgccctcgacaccgccgccgccgccgccgccgagcccgttggcgtgcccacgctcgctcaacgaaggctgagtgccgacggtcgagatgctcgactgcgagcccgaatgcggcccgccgtgtccatactgctgctgctgctgcgaagggtactgctgctggtgatgcatcggccgagcaggatgatgcgcccttgacgagggagcggccggagggagaaggagaggaggaaacggcgcccctcctcgcccactgacgccgacggccgccgcgccggaagagagcgcctcgagcggcgaggttgcagacaggagacgaagcgcggacgacgtccctgcgcccgcgcctgccgagccgttcgcggggttcgtgggcgtcggcactggaggggcggttgaaggtaggaagtgggaggtgacgggcgacgacggcggctgggctgtacctagccggtgtgacatgccctgctgctgctgctgcgtttgctggaggtgatatgacccgacctgcggcccagcgctgccggttaggggcgtcagcccaccgctaccaccaccgccgccgccgccgctgcgggacatcatcgatcctgcgaacgggttgttacttgtcggcggcggtgggaggccgctctgtccggcgttggcgttgacggcgctggcggatgacggctcgcgccgatgaggcggaggagcggacgcggcgagaggtggtggtggtggtggtggtgttggtcctgttgctgctgctggggaggaggcttgcgaatactgctgagggggggcgtacgaccctcgctgctgctgatcggggtggggctgggtcggactgttccctgccccactgccgccgccgccgccgacgacagagacgggcgaccggccgtttgccgcgctgttcaacccgccgttattcgcgccgtcgggagccgaaagcgacgtgtgtctcgacccgacgttgcccgtcgccgtcgccgtcgtcgttgccgccagtggcggagcgttcgaaggctgcgaggcggcggccccggcgagggggcgcgactgcgctccgccctgctgaggctgctgcggtccgacgccatactttgcctgatgacccccttccccgctgccgccaccattaatgccgtacatggcgccggcctcgcgagggctcgcagtcgcctgcgccgtggccgagagcgggttggctgccgagggcgaagacgcgctggacgagaggcggctgttggatgttaggttccctcctcctcctccgaggggtgggggcgggccggacttctttcggcaggcaggccaaagggatcgagttagctgccgagggagcgacgaggagaagagggtgaagagcgagggcagtcgcaggcttcggttgcccaggcttcgctcgcctcggtcctctcggttcagggactcgcctcgcaggcttcggttgccgcccagtcggtcgccgccatcgcctctgcctcggctgcctcgctcctgaacctgcaggctgcccagtcggtcgcctcggttgctgctgcctcggccgcgtcgctcctgaacatccaggccgtccagtcgcaggcttcggttgctgccgccagcgctgcctcgcttttgaacgtccaggccgcgcagtcggtcgcctcggttgccgccgcctcggtcgcctcgctcgccaacgttcaggctattcagtcgcaggcttcggttgcccaggcttcgctcgcctcggtcctctcggttcagggactcgcctcgcaggcttcggttgccgcccagtcggtcgccgccatcgcctctgcctcggctgcctcgctcctgaaccttcaggctgcccagtcggtcgcctcggttgctgctgcctcggccgcgtcgctcctgaacatccaggccgtccagtcgcaggcttcggtcgctgccgccagcgctgcctcgcttttgaacgtccaggccgcgcagtcggtcgcctcggttgccgccgcctcggtcgcctcgctcgccaacgttcaggctgttcagtcgcaggcgtcggttgcccaggcctcggccgcgtcgatcctgtcgatccagggtcttcagtcgcaggcttcggtcgctgcccagtcggtcgccgccatcgcctctgcctcggctgcctcgctcctgaacctgcaggctgcccagtcggtcgcctcggttgctgctgcctcggccgcgtcgcttctgaacatccaggccgtccagtcgcaggcttcggttgctgccgccagcgctgcctcgcttttgaacgtccaggccgcgcagtcggtcgcctcggttgccgccgcctcggtcgcctcgctcgccaacgtccaggctgttcagtcgcaggcttcggttgcccaggcttcgctcgcctcggtcctctcggttcagggactcgcctcgcaggcttcggttgccgcccagtcggtcgccgccatcgcctctgcctcggctgcctcgctcctgaacctgcaggctgcccagtcggtcgcctcggttgctgctgcctcggccgcgtcgcttctgaacatccaggctgtccagtcggctgcttcggttgctgccgccagcgctgcctcgctcttgaacgtccaggccgcgcagtcggtcgcctcggttgccgccgcctcggtcgcctcgctcgccaacgttcaggctatccagtcgcaggcttcggttgcccaggcttcgctcgcctcggtcctctcggttcagggactcgcctcgcaggcttcggttgccgcccagtcggtcgccgccatcgcctctgcctcggctgcctcgctcctgaaccttcaggctgcccagtcggtcgcctcggttgctgctgcctcggccgcgtcgcttctgaacatccaggctgtccagtcggctgcttcggttgctgctgcctctgctgcctcggtccagggccttgcctcccaggcctcggtcgcccaggcttcgctcgcttcggtccttagcgcccagggcgtgcagtcgctcgcctctgtcgccgccgcgtgagttccccgctgattccacctttcttcgctctttccgatgctctactgactcgcactctgcctggcccctcggtctcagctcggttgcgctcgcctcgcaggctgccgtctcgcgcgcttcggttgctgctgcgtcggcttcggccgccgctgctcggccttcgctcgccgctccttacatctttgcctcgaccggcatcatcgccgagggcacgaccggccgcgcgctcatcaacgcacagaccaacacggcgaccaacactcctcagtcttgcgctacctactgcacgtcaatgggcttccccctttcgggtaccgagtttgcaactgagtggtacgtccttttgacgccttgcttgcatcatcgactaccgcaagctgacctaacctcgtcctgtcactactccctcagcttctgcggctctgttctctccaacggcgcttcgctctcggtcctctcgactcgcggctcgatgcagtgctcgggcgacatccagcagacgtgcggcggtcccaacggcctcacccttgtttgtcagtcgcctcatcttttcttcactctctctcctcttcccgaccgtgaagcgcaccgctgatgcttcgctgctcctccgcctgttctatagatgactcgaccgttctcaacgccgacctctctgccaaggctgccactggcggtaacgctgctgcctcgtccgcctcggtccagtcggtcgcctcggctcagtcggctgcctcggttgcctcagcccagtcggttcaggccgcccagtcgacagcttcggtcgcctcggttgccgccgccgcccagggctcgcagtccgccgcctcagccgcttccgtcgcctcggttcaggccgccgcctcgcaggcttcggcccagtcggttcagtcggttgcctccgttgcttcggtcgcctcggcctcgtctgtcgctgcggctcagccttcgggctcggccggccttcccgctggattctcgttcgcctcgagctcgctcatcgccgagggctcgaccggccgtgcgctcatctcggcctcgaccgcctcggactcgatgacgcccgccgtctgcgccgcctactgcgacaaccttggcttcccgctctcgggcaccgagtactcgcgcgagtggtgcgtccgagcctgaagcttccttttcctgcagcagcagctgacgcttccttctcctctctctcagcttctgtggtgatgtcctctcgaacggcgcttcgctctctggcacgtcctcggcctcgcccatgccctgctcgggcgacgccacgacgacgtgcggcggctcgtcggctctcacgctagtctacaactcgaaccggctcaacgccgacctctcgtccaagactggcactggcactggatcgtcggccgcccccgctgcgtcgtcgtcggctgctgcctccggtagcaacgcctcgaccggtcctcttccggccggctttgcccccgcctcgtcgagcctgatcgccgagggcaccaacggccgcgcactcatctcggcctcgacgtcgtcttcgagcatgacgcctgccgtctgcgcctcgtactgctcgaacctcggcttcggcatctcgggcactgagtactcgtccgagtggtgcgtcccttcttcttactccaccgcccgctccttcttcctcctgcctttcgtaggagctgacctcttcctccgctctaccagcttctgcggtgaggtcctgtccaacggcgctgcgctctccaagacgtcggcttccgagcccatgtcgtgctcgggtaacactgctctcacgtgcggcggtagcaacgcgctctcgatcatctacgacaccgccaagtacaacgccgacctcacccccaaggctggcaccggcaccggctcgggcgctcctcctgctgcctcctcgtcggccgccgcgggtggcgctggctcggccggtcttcccgctggattctcgttcgcctcgagctcgctcatcgccgagggctcgaccggccgtgcgctcatctcggcctcgaccgcctcggactcgatgacgcccgccgtctgcgccgcctactgcgacaaccttggcttcccgctctcgggcaccgagtactcgcgcgagtggtgcgtccgagcctgaagcttccttttcctgcagcagcagctgacgcttccttctcctctctctcagcttctgtggtgatgtcctctcgaacggcgcttcgctctctggcacgtcctcggcctcgcccatgccctgctcgggcgacgccacgacgacgtgcggcggctcgtcggctctcacgctagtctacaactcgaaccggctcaacgccgacctctcgtccaagactggcactggcactggatcgtcggccgcccccgctgcgtcgtcgtcggctgctgcctccggtagcaacgcctcgaccggtcctcttccggccggctttgcccccgcctcgtcgagcctgatcgccgagggcaccaacggccgcgcactcatctcggcctcgacgtcgtcttcgagcatgacgcctgccgtctgcgcctcgtactgctcgaacctcggcttcggcatctcgggcactgagtactcgaccgagtggtcagtccttcgtccttcgtcactcttcccttacctactgcgaagctgacccgccttctgcctgtctgccagcttctgcggcacgactctctccaacggcgcctcgctgtcaaagacctcgaactcctcgccgatgccctgtggaggtaacgctgccgccacttgcggaggcagcaacgccctgtcgatcatctacgactcgaccaagttcaacgccgacctcactccaaagtctggtggctcgactggcggatctactggcggctccaccggcggctcgaccggcggctcgactggctccaacactggcgcgtccgcaactggccccaacattggtgcctttacgctcagcaacggcttctcgaccgacggtgcctgcagtatgtctttcagcctctattactcaagcccagcgcgcgcttgctgacgtcccttaccctcgccagtcgccgagatctctggccgacttctcaagaaggcttcgcttaattctggcgccatgacctacgagctttgcacctcggtgggttcaatctgtgctcctctccttgtgaggttgttcgctaactcttctcccgctccccccccccttcgcagtactgcgccaacaacggctacgcctacgccggtgtagagtacggcagcggttcgtgttcttcccttccctccttggtcacaactcctgaaattgacctcctctcattccttccgctccgacagagtgctactgcgacagcgaggttacggctcgcaacccctcgacacagtgcaactctcgttcgtcccccaatttgccttcgaccgcgcgctcgctctccccacaaactgacctctggcttcatcacagcttgcgccggcgctcctgacaagatttgtggcggaggacaggcgcttcacatcttccacaacccagccgtctcggcaacgcctgccgccctctccaacggctggaccaacaccaagcgctgcctgcttgacggcgcgaacggccggctcttcaacgaggcctcgaccgagtcgtcgaccatgacgcagaccgtctgcaccgactgtgcgtccccgtcctgcgtctctctgtcgagcccgagacccacctggctgaccctcccgcttgactcttcgcgcctaccagtctgcgccagcaagggcctcgacctcgccggtatggagtactcgagccagtgcttctgcggctcgtcggccaaggtcgacatcacgacggccgccacgtcgtcgcagtgctcgatggcttgctcgggcgactcgactcaggtgtgcggtggaccaggtgagtttgccttcctgggccaaccgcgacgatttcaatcgatctcttcgctgaccgcctttctgctttcctctagacgccctcaccgtcttcgtctcgggcagtgccaagcgctccatcaagcgccgtactcccgtccgtcgccacgacgccaagcactagacgctcccctctcccttagctttctaatcctggtttaggtctacactatctcctgtcatctctcgtcgtctccctctagccgcgcccagcacaacttctttctctttcgtcccatcctgccttttttcccttccacctctttcgtttctcatctttcacccttcgcccactgtcgttaccccatctgctagccaattctctttgccctccgaaatgttgtgatctcaatgacgctgggccaccaatctctcttttttcattgcacgcagcggagacgaccctttgcgtaaaaaagtggcagcactgtgcactctggctctgccaaagagacctcctggcacgacttcgcttctgccctcgagctcgtgtccgcgccctcgtctcggctggccccaaactcgctttgtaccttcgttgcctggaacgcgtactgtgacagtccctccttgtactcctggcatcactgtcggctgtcaagcttttgcaatcaggtctttcgtctttatgctgaaaccgtcagacgagggaaaccttccggcaagcacggatttgaagaagggacgaacacaaaaaccatacatccgcatctaccgaaacagggcagctagagacgtcgcttgacaccgctgccgatcggggcccggccgcccttgcccttcttggccgccgcctcgtcatccttctccttctggcaagtcgggcagtaccatgtcccctctggcggcgaggagagctgcaggcactcgagatggaactgcggaagcaggaaggagcgaccgtcagcgaagccattatcgcgggcggggaagaggtctcccggacggacccattcgcgctcgcactcctccgagtcgcagccaatcatctcgccgtagctcgggccagcgcagtagcagtaggcgacaccgtcctcgatgtcgaccttgccctcggccccagcagcgccaccagacgccgcaccacttcccgaagcagcacctgggccgcccgacgccgcggcggccgctgttggtggaggcgtcgtcgacgattcagagacgtagcccgcccgaggccggacagcatgtgccttacggcgccgcgatggccgagcgggcccgtcctcggacgatgactcgtcttcacccgcagcggctgcgccggacgccgtcgcgccggtcgatgcgccagccggcgtcaccaaggcgctcgtcgcagccgtcccgcccacgcgccgcttctttgtgatgggtcgcgaggtcgaaggtgctgtcgtgtcgaggtcgtcgatgccggcgccgtagccgaggccgccggcggtgaccgagtcgacgaggttgagatggtccatctcgtttgtcgaggtcgccatcgacgtcaccggaagacgggacgacggccgtggcgacgggactgccgggaagggcgaggcagggcgagccgagtcgctggaagaggggacgggagaggtcagctggagttcgagcgacgagaggtaaaggtggacaggacgacgcacgtcgccttcttcttggccgcggcgctcttcttcggcacagctgccggcagcttagggctccggcctccctcgagccctgcccggccgcttgtgcctgcataccgtcctccgtcgtcgtcatcaaccgccccgccagcgcccctgccggccatgccaaccttgcgcttcttgacgggcgtcggcgcaccgccaccaccgccgccgttgacgccgccgctgccgttgacgccagagttgccgcctgcgccgccgccgatctcggccccggcccgcgcgcgcgtccgcttgcccggcagcgtcggcgggaggtacgaactgccctcggcgagcggggccgaccgcggctggaggagcgacgagtgcgacaggagcgagagcagatgggcctggtgcgagatgacctgaggacgggccgagatgcatgcgcagggagctagtcagcgcgctgaaccttgcgggctggccgaaccagccattgtacaacagccggagtgctatccaagagagaggctggtcactcacgccctcgcagacgccgccgacgacacgtatcttatcctcgccgccgagcttgaagcgctgggcaaactcggcgacctccttgagcaggatgagacgctcgccaggcgtcttcttagggtcgttgacggcggccgtgaggcccttgatgctctcggtcaggtggatgagactcgctgcaggagcaagcgaaaaccacaagcatgtcagctgacttaatggtggctatcggtatgaagtcgaggagggccggcacgaacaggagaggacggcatcgagctcgcggaggtcggagaagcccctggtgagctcgagcgggagggcatcgagcgtgtcggcaaagtcagcgagcgtgttgaggtcgtgcgtcgtctgctgcgactgctgcataggcggaaagtagtaggccgggcccatcgttggctggatcgtctgaggtacagggtcgtggtttgaggtgcaggcaggagcaagacggcgccggccgaagacgggcagcagggcctgtcaacgccgaccacgtcggaccacgctatagcctgtccggcctctcctgcagctctctcctaatagctctaagactgcagcaggaccaggtcgaaagcaacagctggccatgagcgggtcaaagtacgagtacgtgcggacgtacgagcggccggatgcgctgctcgccaacacgtttctcctgctccggatcgacggccacgccttccacaagtacgtcgtcgccagacgtaaggcaagctgctcggaaacaatcgtctgctcatcgagggcctgagtgtcttctatggacaggtgaccgccgctcgagccagcggcaccgtctgatagcttcgagagcagcaagaccctgacgcgtcgccgccccgaccctgcaggttctcggacaagcacggcttccgcaagcccaatgacgaccgagcgctcaagctgatggaccgggcagcccagagcctgatggacgactacccagacatcgtcctcggcttcggcgagagcgacgagtactcgtacgtcctgccaggtcggggcctgaggccgctgcgcctgggctaacgaccctgaccttttgccccttgatcctgacctgcctcgcagcttcctcatccgccgcaagtccaacctctactcgcggcgcgagtccaagctcgtctcattgctcgtctcgctcttcacctcggcgtttgtctaccactggtcggcatacttcccaccgccatcagcaggcgccgccctcacaggcgcctcagcctcggccggcgacccgctcgcttacccagcgtctttcgacctgctcgtagacgccgtccagccgccgactgcagccgacgccggaaagctgctatatccgccgacgtttgacgggcgcgtcgtctgctacccgtctgagaaggaggtccgggattactttgcgtggcgccaggtcgacagtgcgtacggcgaccggcgtgctactcagtcgacaattgctgacctgactcgactctagcacacgtcaacaatctctacaacacaacattctgggcgctcatcctcttgcctcctataccgggtatccctttttccgactcgcccccatcattcgcaggcgcgacagatcccggttcgaccgcaggcggaactccttcggatgcgtcaggctcgcggccggtcgtctcaggcagccagatgacgacgacagcggcgcacaaggtcctccagggcagcatttcaaaggacaagcacgagctgctttgggcgcggggcatcagctacggccggctcggcgagcgcgagaagaagggcagcatcctcgtccgagaggtacgtccggcctctgccgtcgcgtctgatgggctgctactgacgcgcaacgctcctcgactttcgcaggaagtggcgcaggaagtcgaattggccgctctcgtgtcactcgtgttagaagacgacgaggcgccctgtccgtcgacctcgccgaacacgagcgcgtctcaaacagagacaacatcgtcagatccgccgccgccggcccactggacgaaccgaaagctccaacctaagcggggcaagaatcggcagccggacctgccatttgacgggacgagcggcaaggtcgtcgttcttcacgttgacctcattaaggacgccttctggaagaagcgaccttggctgctcgcctgagcagacgcgatggcttgcacggcgtcacgatagccaagagatggtgcaaagagacgattgagcgcggggcagaccacattgtgctagcgtaacgtagagatgagggcgagataaacaacaaggaggagaggcaagtgtccgggcgtaagtctaagaggagaggggcggccgcacggaagctcagtctgacggctcccgggacgtcttgtccggattggcgagagtgagcgtcggccgggcgaccgtcgtgtagcttgtctttttgctccgagcaggcgccagcttcttggtgatgaggagcggctcggtcgtcgtcgtcgagtgctgctcgaacgcggcaatcgtgtcgcgtactgaccgcctgattggcggcggcgcggcaggtgtcgggctaggataggatgggctaggcgaaagcgagttgatcgagaagggcgacacgactgtcgtcctggaggacgttgatgttgaggtcgccatctcggcggacgacgggaccgacatcgagggagaggtgcgagctgacttggcagacggccccgacgacgagagcggcctcgccccggtgggtcgcgcgggaggccggacgaacgtcgctgcttcgctgactgtcggtggactcagggcaatgaggtcgtcgcccggggcgccgtcctcgaaggggttccgcagcggttcgatggctgttgaggacaggcttggaggaaagcggaacgccggcgctgagggtgatgattcgagttctggcgaagcctcaggcgttgcggtagagccggaggtggtccggttacgctgaacgatgtcgaggtgattgaagcgctcaaactggtccgaggttgcggtgtctgcgaggagacgagcgtcagcactcctttccttctctttagcgctgcggagcgttactcacgggcactcgtcaagctgctgagactggcatcctggccgcggccgagttgaccgaagctctttcgtcggcgaccagcccattcgcccttctcaagatcctcgtcgaagccgaggacgggcggcgtcgccgggtcgcggaggtcgcgcatgcgcgagcccatcacgcgcactgacggcgggaggttcgtcaggcccgagattggcggcggtgactttgctcggaggttaaggccaagcactttgcgccagcctgagttcgagttagaccgactcggcggtgcgctcggctgcgggtaaaaggttgaggaggcgaccgccggcggctgggagtacgggtcgccgtgcgagcggtgtgacgaggacgaatggtttgacgactcgggtgtcgcgctgtagtcggtcgtcgagtaggcgccggggtagaagttggttgtcgccgcagagcgcttcatgccggccaagcctctggtcgcaggtccagtagcgaaagagggagacccctcgtcggcaaagggatcgctttcgtcctcgtcgtgcaggcggccgtagccgatgtcgccccctgcctcttccgactctggcataggcgcgaatgacgagctctgggcaaagatgcccatgccagcgcgattggttatcccgtcgccgaacgagtcggcctcgcgcgtgtcgtcctcattgccgctagtgcgcagcgagtctgggtgggacgacgcgcggtcgaatggcggcgggtaggtctcgaaccgccgggtgtcctcgtcgtcgagcatgccccatcggcggccgcccggaccgactgcagcaccgctgcggccgaggagaccaggcgccgagccggcaaccgtgcccccaccgccaccgacgccgacggcagctccgagcccagcgatcttctccgacaatcgaccatacaggcgaatgcgcttgcgctcacgtcccgtaaagtcgttccacgtcgcgcctgaaccgaatgcggccggcgaccacccgccgctctggcgagcccagtcgcgcgattggccgccggcgaggccagccttctcgttctcatcgtcgtcgtcgtcgggtccgtcacgccgccgtttgcgcaggacgacgactacgccgagggcgagagatgcaagagcgaggaagccgaatgtcgacccgacgccgatcgccgccttcttcgagctcgacatggcgccgttcccagcctcgttcgacgcattgccggaggagccgtcgtcgccggcagtcgcacctccagtcgggctttcgccagcctggcgcgatgtcgtcaatgtcgcgaagccggggacgatgcccgtgtacgtcgctgggtcccaaggcttatcgccgaaaggcttcgcctgcgacgtgcgagcgcttgcagcgagtgacagagacgcaaacgccgcgggatagaccgtgctggtgccgcccgaggagagcgccacctcgtagattatctcgacggcgctggtcgtaaccattgcggttgcgacagtagacatgacggaagacgtcgtctcggctccggcagcgttggtgacaacgactggcacgacgctttggaccgcctgcgtttccgtgtagacgagtagagtcgtctgcgtgccgatgactccagccgggacgacatcagcggccgatgaggttgcagaggcagcgtcttgcgtcacactcgctgacccagaccagcaggacagcggcgtgaaagagtcgaggtaagcgttggtcgcgaggtcgtaaaggtagagctggccgtcggcagctgagtcggtctcgtagcctgatgcacaagtgaaaaggtcagtaaagggctgtcgctcacgcagcggagcaggcagcacgaaccgccgaaggagagaatctgagagttgccgatggcgacaccttgcgcaccgagtctcggtcctggccctgaacgcccgagctcaaaggtgtcagcctcgccgtagttgctcgagtgctaagagtcgacgtaccgctgcctgccgaagcgacggcctgccactgggcccgctcaaagtcgagcacgaacgcgtcgtcgagcacgcgctcgagcccgttctggcccgttccaccgccagcgagaaagaggccgctgcccgagccgaacgtcacaccaagagcagcacgtcgaccgggcggcactggtccgtcgagcgagactatttgccagctgcttgctgggtcggtggtgtcgagcgcgtaggcggtcgagaggggtgcgagcgagagggaggccgtgttgaagccgccgagcagtaggagcgtgccgttgttgaggcaatggagggtcggctggaggaggcctgcagggagcgtcgcggcgagggcaacgaagcctcctgtcggggtgaaggcataggttgagaggtcggctgtgaccgagccatcggcgcgcgagccggcggtgaagtatgacgtctcgccgagcgctatgaggcagaagagagagtgtcagaagatgtatgtcgagctgtagggcgaggtcgacagagcgggcaaaagcacgtactgcatgacgcggcgccttccctcctgacgggctgcgcggcccactcgctcgcctcctgcttccagccggccgctgcagagtacagccaggccgagtcgcggccggtctgaacggctgtccctggactaccgtcacctccaaagctgagcgctcgacccgagccgtccccgagagactcgacagacgcccaggcatagggcgggccggggccggcgagctcctgagcgagctctgaggcgtcggcgaggctgaacgacctgtcgagtgggatgcggagggccgagcctgtcgttgatgacgacgtgtacgtctgacccgcaaaagtgagcttgccgccggagatgaggagtgagtgctcggagggcgaggtggttgacgatggtgtcgagagaagggcgagcgtgtgcccccagcgcgagggcagggcagcggcgtctgcggcttcgggctgaaagagggccattagcaggacgagcgggagaaccggtgagaccatcgccaggatgggaaaagaggttgaatcgagctgagacaagttcgtgtagacgggttgtccgggttgaggcggtggacggagggtgtcgaagtcgaccctgttgagcgaaaccaggcgcgcggcgcggggacgatcagcgcgcggcggccgccatcaggaaatccggggtcgagccacaccgaccggcctcgtctgcgagcaacaagtcatcggctctagctgctcgtcggtccagaagcattccgctcagcttcttcttgccatctgttcaggtatagctgctgctgcggttgttgacccgcatgctccgagggatctgatgcgtcgtgagaacctaccggcctgagcctgacacctgagtttggcgcctgcctcggctctaggagacgggccgcgcggccgacgaggcctgttgcgtaacggacactttcgtcgacagcaggcgaccaacggccacctcacgcaggcaacgatgaccgcacgccccgcttcgcgcccacactgacagcaggccgtttacgacgctgacctgagaagagcggtggctcgccctacataaggacgttgtctgccgacggcttcttcccttcaccacctgtccctgtcacaccgcccctctcgcctctccgcctcggcatgtcccacgcctcacccatccagccagcaccggctcaacagcacgtccaccacgccatctcgggcctcgacgccgtcaactttccagccctgaccgaggccggcccccagcggacggacgagtatgtcgtcgagacctcccgcggcttcctccgaccttccgaggagctcgccgccgtccgcaaggagatgacgacccaccgcgccgtccgcgaggaggcgacgaccgatcgctcgccgacgtcgacgatcgtccacgacggcggctcggacttggctctgacgccggccgagcgcgagaaggggctcgacatcaagctcgtcacctggctcaaggacgaccccgaggacccaaagaacctcagcaagggcagcaagtggctcattacgctcgcaatctcgtacacgtgctttgccgtcgccctcggcagctcgcttactgtcatggacatgcccgaagtcgccgaggagtttggcgtttcgatcgacctcatccacctctcgattgccgtgcgtacttctgcccgctgtctgccgatccaccgcccatctgctgatcatcttcaagccatgtcctgagtaggtctttgtctttgggtttggtgtcgggcccctcgttcttgctcctctcggcgaaatctttggccgacggccagtcatcatcgcctccatgacgatgtactggctcttcaccttcccgtcagctttcgcacagaatgtcgcgacgctgaacgtcggccgagcgatcgctggcttggcggcttccgctccgatgacggtcatcggcggcgtcctcagcgacatctttgactcgtcagagcgcggcaagccgatggcactgttctctgggaccgtgttcatgggcccttgcatcgggccgattatcgctggctaccgtgagtggtgaagatgtgatcgtcggaacgtcgatcgagacgctgacttttcctcccgcccctctcagtgagcgccaagggctggcgggcaaattatgtgcgtcgttatcgcctggaaagaagtggctacgccgactgacattgcttctcttgctggccacagtatctcctgctcggcatctccggttcggccgctatcgtcgccgccctcattctgcctgagacgtacagcgtcgtcctcctccgccggcgggccgtccgactgcgcaaggagacgggcgacgaaggctacatgacgagtcaggagctcttcaagcggccgtttgccgaggtcatgcgcgagtcgctcgtgcggccgctgcagatgctcgtcaccgagcccatcatcttccttttctcggtcagtgccggtgtctcgtcctctgcccttcgcttctgctgacaccattcggacgctttcgaaccgcagctctacctctctgtgagtcgacttgcggcgggtttccgcgtcacaccctgctgatacctgtcggtccttcgccttcccagctcatctactcgctcctctacggcctctttttcgccgtccccgttgtcttcggcgagattcacggtttcccgctcggctcggtcggcctcgcttttgtcccaatcatcatcgggatgctcctcacgttcttcaccatcctgccttggcaggcaaagtactacgcgcgggtcgacgccgagtgccgcgcgcagggtcttccgtccgcgccacctgaggctcgtctgccatcggccatggtcggcgccgtactgcttccgatcggcttctttagtgcgtacctctctttgcgccgcgggtgaagaaacgactgaccgctcgattcccgctcctcgacagtcttcgcctggacctcgtacaagcacgtccattggatcgcgcccatgattggcaccgcctgctttggctttgcgatgctcggcatttacgtcggctgcaacggctacattgtcgacagcttccccgagtttgcgtcctcggccatggccagcaagacgctgctttcgcgtgtctgcggcggtgccttcccgatgttcgtcgacaggatgtgtacgttctcccgccctacatgttcttttcccctggtcttctatcagtggagaagctgaccctggactgcgcctccttccctcctcccgcgagcagacgccagccggctgggccctcgctggtccagctgcgtcttcgccctgacagcttgcttaatgctccccatcccgttcctcttctccaagtggggcgccaagattcgcggcgtacgtcctccgcctgtcgctctccgctttcatgtgtcgactgacacaaacggtctttcttgccctccgttctttacagatgtcgaagcgcagcggttgcgccgcatgagcaccctctccctctcccactgcctccttctcatcgtttgtgtcgcttccagaacctagttagatcaatgactctgcttcgacaaccattctgcgaggtccttgtgaacgagttctgctgtcgtccgcgtcgtcatgctgccggcgagccggcctgaactcgcaactgcagttcagattctcgcccgttgcgcgcgctgcgtcgccggcttcgacctcgtcctctcgctcctcgaccagctcctcccagcagacgcttcggcaaccccaataatctttctccagccctccagatagcgtaacagacatgccgccgaaggcccagaagcaaaatgcgccgaaaggcagcaaggttcgttgccttgcactcggttcgggagccggcgcttgaggtcgtcaggccgacaagctgaccgtctcagagcgacgtctcttatgtgctctgacgaatgccgtggacaagcgctgacgctctcgctcacgctctgatgcaggtcgcgatcgacaagacgttcggaatgaagaacgtacgtcggacaactgagttcacgagccgtgccttgagctcgagggcggggtgacgcaagagaaggaaggccagcgctgatcagacgagctcctgcttctcgcctttccgctctgtagaagaacaagtcggccaaggtccaggagaaggcggccgtcattcagcagcagcaggcccggaagggtctgtcagaggccgacgttcgtccctagcagcctccttccttccgacgccgcctgccggacccgctgacgcccagcgctgtgctctctcgctcgacagatcaaaaagcaggaggctgcggcgaacgccaagcggatcaaggctgaggaggctgcccggctcaaggctcagatggagctcttcaagccccagcaggcgcagaaggtgccgttcggcgtcggtgcgtctgctcgcgtgcccgtcaacgaccgctgggctccgccgagctcggggctgaccgctcgcttctgctcgctaattctgcagatccgaagacggtcctctgccagtactttgccgccggcttctgcgacaagggcgtcaaggtccgttcttgccctgcctctgcgcgatcaggggaggccgtgctgaccctttgcccgcgcgtgcgacttctctcctcaccttcagtgcaagttctcgcatgacaagaacattggccgcaagaccgagaagaagaacctgtacacggacgaccgcgagggcgtcgccaaccccggcgctgtcgacccgaacgacaagaagctcgacacgatggacacctgggacgacgataagctcgccaaggttgttctgtcgaaggccggcaacccaaagacgtcgaccgacattgtctgcaagttcttcatccaggccatcgaggaccagaagtacggctggttctgggaatgcgtacgtcgtccggcttggatgcgcccgagtcaggcttttggtagcccgctgactcaggagcgccgcctcgctcgcctgccacgcagccgaacggtgtcgagtgcaagtaccggcacgccctgccgccgggctacgtgctcaactctgagaagaagaagaaggaggccgaggccaaggccaaggtcatcacgctcgaggagttcctggagtccgaggtgcgtcgcgcgtgcctgcgcccaaagagggtcagtcgactggaagctgaccggccatcctccttcgcgctcacagcggcacaagcttggcaagaacctgacgcctgtgacggccgaaacgttcgcgacgtggaaaaagacgcggctcgacgccaagacggcgcaggagcagacggccaacaagctcaagcagcaggcgggcgcggcgggcaagatgacgggcatgagcggcaaggacctctttacgttcaacccggactggtacaacgaggaggacgacaacgaaggcgacgacggcgacgcgtgggacctcgaccagtaccgcaaagacgaggacggcaacccgatcgaggccgagcgggacgatgatgacgacgattcagagacgacgcggtccggcctgccgccgcggtcggaagcgggcacgtcggatgctggcctcgagcggtctgttgcaggtctcagcgtcgcgggcgacgagcctgccgagagccaggatggcgcgacgagtcgggacggttaagcacgagactgttgttcgaatcgtgtagtatgaagtctctctcgcagcatacgatccgtgacccaccaagggggcgacgactctgctgctcgacctacgtccgccgccttcgacggttcaggcaggccttgtcgctcccccctcccctcaaccccttgtcaccgaccctctgaaagcttctcattatccagcttttactacacgagagtcgggacggtctgaggccgttgtaattgaggttttgcgagtcggtgctgcgaattggtcgtcgaggggtcaacgacttgcacgagccaaagcgctgcgctcggctgccggcgtgcgggcgcgccggagggaaggccaagacgggagaagacctggctctccttcgtccattcgccctctcacctcatcccttggccagctcggactggctcggcagctcgcttgagcacggcaggccaaccgggattggcagctcgtgcccgagtggggctggcgagctcccaggcgccacccgtgcggctgcgcgcgggaaggaagctgcttcgccgacctgccttcccgcccgtcctgctcgtacgaccgcctccccggtcccgccatcacattttgcctgactgagacctcacaggacggaggctactcgaggaggcgccgccgtcaaggcttgagtgatggttggtcgacgtcgacgcattggccggccgtcgatgcttcccgctggcgctcgagttcggcggccgactggcgtctcgccgggaagagaagtctccatcgtcaatctagccggcgcaggaaggaggaaggtcaagccgccggtctggctcataggtcacgactcgtcgtctgccggctggacgatcgcgcccgaaggtgcatgcggggattgacaccctgcgccccgtttttgccgcaggctgctgtccaacgccccgacgtactctttcggccagcgttggccgtcttcacgaagggaacggggattcttgagcgctgctggcgtcggcgtagccgagatggacgaaagactggcttgttgccgtgtcgggctgtcgaccggtctgccgctgaccgaccgaaggcccttgcgatcagggcgacagctcgagccgcgacatctactcgcacacgttgcagccggccgagccaggaaggcggcagtcggcgatgcttcggccctgctcattgacacgttccggcgttagcctcccgtcttgaccgcaggtcgctcgacctgacattgctgctggcccgcgcgccatgcgaccggcttgctggcgggctcgctcgctaacccctgtccgagccgctgcctgcaaaggtcgatccatagtccgaccagctgcaggttagctggcgggtgagctgtcgacctgctggccggcgacgttggcaggcagctcggaaggaggggtcgcgctgaggtcagctcgctggtcagcgtcacttgggcgtgcgacttgtggtgaaatggccgtctgaccccgctgctgctgctgctgacttgctcgcaccttcggtcgtctcgttggggtcgacaccatcgctctcggcaacgggtcgggacggggccgactatagaggccgacgcccagcggcaagtcgacccgtagcgctgcattgagcctggtagaatgcagcgctggggcaagccaagggttcgcggttcagcccgaccttgcccttgccccgctacgtccaccgtcaactcctcctgcctcccctctaccacccacttctccagcagaccacctccttccggcaagcaggtctttcgctccctcccccgaccctccctccagccccccccccccaccccttcctctgtcgtcgacaatcgagaatgacctcttgcgatactcagccggtcaatgctccctcggtccgccaaacagactcagccgacggatcgaggagatcggactggtggctgccgggcccgagtgacgccggccgtcctccgccgccgacgagagcgagtggtgggagcctccgttccggcgaccgagcgtcgagtcgctctcggtggatgcgtgtctggtcattggcgatgaggacgacgcgaggctgagcgtcttggtccggctaaagtagccccgagcgggctcatcgtcgacgtcgacgtcgcccgcatgccgttcgggcgagccgtgagtcgccgtcaccgtgctcagatcggtcgtcgccggagagaccatcggagcagaggggaatagcgacggcgcccggacgagcgtcggcggcaccgctgcccggacggtcgacgccgtcgacgtctttgcgtgccgccatgcccgctctggcaggtcgcgcacatgttcctcggatgaacggcggagggcaaacctgtcaacgacttggccaaggacgcccgaccggcgggcaggtggcggcgagagctcgtcatttgtgagcgggaccacacgccgggcgtcgtccggcgaaaagtcgctgtcggtaaggttcagcgtccgagaagaggggatggacgcgagccgctcgcgcgtgagtgcggcgtcgcgcatccggaccgaaggcgatgcaaccgagtagcccatcgacgtcgatggacgcgcgtgggggtcgattcggagaggggctgcgagcgaaggaaggagacgagctttagcagattgtaaactttgcttgcttccagggcagattctcgtaccaggctccgaaccgtcgcgaccgtgtcgataggacgtcgtccagtcggccgtctctgaccgtcgcatgccagagatcgagccggctgtgggggccgcactggtgacggcgagctgctcgcgcgaactcttcagcgtggcgatcaggagcgccgccgacgcgcgaacctcctcatcattcatccgcagggcatccttgagagcggccgacatggcttggcaactctcaacgtcggcagactggctgcggtcgtcgacttgcgcagcaacgagccgctcgcgggcgaaccgcgacacttcggtcaaggcgaggttggtctgttcgacggtcgagacgaggtcgttgaccgttcggacgacatcggccgtcgagggcaggtcggcgaggcgcgagtagtgtcgctccagagcctccgacgcggcaagcatgttgcggacgtgatccggctgagcctggtcggggtcggcgaaggacgagaggccagactggatcgagaaggagttcggcacactatagcccgtcgtcgaccgtagatccatcggcgtccgccgaccggcgtcgctgccgaggcgaaccggatcgttggagagtcggcgacggcggatgaggctcggcgaaggactgccttcgcgatgtcccgactgcgagccgctgctgctgggcgtctggaggttccagacggagcgatgcaaccgcaggccatgttggccgacaccgagcggaggggcggtcctcggtgcctcgctggtgtaggccattgatgttgacggtcgggctgaaaggccggtgtgggcgccccccctcgtcgctccgacgccgccgtggtccctgcggttgagcggcgtcgcaggctggaagtcgctgccggtcggcgagcgtaacagagacatcgagctctcggcccgcttcatggcgtggacctcccgaagctgacgcgtacgacgctcgctctcgaggtcctcctgctcgatgcgctggagcagcgatcgggtccgactggcgcggctttcggcggcttcgctgccggcctccgaaaacaggtcgtcatccttgccgccagtcgatgggaaggcgataccgttctgcctgtcgccgccacgccgggatccggacggctggcgagcgagcgcactctcggcactgccgcctcgcccggcataccgcggttgatcggacgaaagagtctcgctcggccgactgtaccgggggcgtgtcgcagagaatgctggctcggtcgacggcgacggcaaggggcgagggagcgaagggtacctcggtcgggacgacgtcggaaggtcagaagacgacgcaagggatgcgagggaagccgaaggcggcagcctgtcgtcgaggtgccgacgaaagttgtcgcgagtcgaagacggtgtagatggcccctgatggttgatttcgcatgacgccgtcagcaccacgctcacgtgtgagcgatgatgtccagatcacacgcacagactcggtaaggaactcggacggtagcggcgcccgccgtttgccgctgctcgccgtccgctcccttctgtgcgactcgctctcctcctcgccggccaaccctcccgagccatctcctagcagggcgtcgacctcctcggccgaatcggccgatgtctggcgctcctgattcggccgcggcagcgtctcgatcagcggcgatgagccgaggcgcgaccgtggcccaaccgatgagcgcgaatggctgctcgaggacgaagacgaggactcgcgtcgaaggcgcgacgaggccaagctcgtcatggacggggagctcggcatgccgccagcagtccgggaagtctgaacgcgtgagggcgtcgcttggggcgcggtcgaggtcgaggtcggtctttggccgggcccgtcgtccgacttgcgcgagtttggcgaaggtcggaccctggtggccgccgcgcgaagcggcgtccgaccagaggcggatccgcgcgagtccgatcctcgactcgagacagacgccgtactctgcgatcgcgagagggctgcggacgagctcggcgaaggtgtgccacgcaggcggcgcgtcgtcggcgtcgccgggggggcgggggaggtgcgccggcctagatcactcgacgaggtcggccggtgctcgcggcgagcatggctgctgccggtgctgctgccgcttgcctcaccacttgatcggctgaagccaccgtccgatgaaccggccgaatggggtagggaggccgtccgtccatgacctctggtcgacgacgagagcgacggcggtggcggccagcctctgccgcccgaggcagagttgtcgatgctgacgcgcttgttcttcttcttaccgttcgtccgatccctctggtcgcctccacggtccgagaacgatgaggatgaggcctgagacgacccgctgcgagtgccgccgcgctccgtctcttcgccggagagcgactgcctggacgacgacagcgccgaccgtagctttggagatgcgatggtcgtcgcctcggcaccttgtctgagccgggccataggtggatcgagcagaggcttggtcggcgatggcgtctggcgagaagagaggctgttgatgatctagaatcggggttaggcggtggggcagcaggtcgcgtcaggggatgcgcgagagagtcaggagggatgcggagctgcctcgagcgtgacacacctttgcgctgcgctctctgaggtcgctcagccgcttgttccttcccccgtcgtcttcggctggccgagcaacaccattggcgcctgcggtcgcatgctcgggggcgctgaccgtcgacgcctccttttgcagcccagtggaggcgggcgggacggcctggagcacgctacccgggaggcgcaggcttccgccgatcgagctgccagacgcctctgagctcgtcgtcggtggggatggcaggccataaaaggcacgcgcaggatgggcgaggtcaatctggtgcaccgacgacgtcgaggcgggccgcaggctgtttgagggccggcgcggcgacttgggcggccggagcggattgacggcaccctgtggctcgccggcgtgcgagtcgaccgagccggtcgaggaaagggtgtcgaccgagctcgagccagacaggggcatgctttgagggaaagaagggacgagagttggcaaaagggagagatcgtcggagggctgtcgaggcgcgtcgtccgtcgcgccgcgcgccttcgtcatccgcgcgggcggccgctgtgtaccgccgcaacgatgcgcgacttccgctcgccaagtctcagttccgacagctcttgatacatggatcggaaaatatgcaagggtgtatacagtgcgatgcgaatgatgacgggaactctagtcttggagtaaggtctgcgcgaccttggaagcggcccggatccgcgggccatacttgatgaggacaaaggggacgatgccgaggacggcgccgacgaggccgcagagggtcgccgcccaccttgggttgaggccctcgtacatctgagagaggcgtccttatcagcgcagggtcaggacgagcgcaaccggcgggaagaggcacgcacggcggtgatgatgagcgggaagatgccggcaaaaaagttgcggctgaacgactgcgcggcgagcgcagacgaggcgtagatgaggtagcagtcggagagatagttgctgcgaggcgcaaaggggagtcagatggaggtcggtcgaagagaaggacgcgaaggacgcacaagaccgagagactgcaaccgaaacgaaaggagggccggttcagtaaggatcctgcgcggaaagcgcaagcgaaggtgggacgcactagatctgaaagatggcaaagacggtgacggtcatgctgatgcaaggcgcgatccagtggacgtgcgagtagctcgtccaggcaaagcagaggcacccaatcggaaacagtacggctgcaacggaagcaccgaacaaccgggcttcgggacccatggtcggctggtagcggctgcgaggagagggagtcgagttgcgtcagcgtccaggtcgaaggccagaagaggagcgatgcctcacaggtagagcttgtcctggtacaggttggccacaaagccgaggcagacggcaatgctgaaaagggcgaggggacgatcagtggtggaccgagagacgccggagcgagaccctcggactcacaagaaggtgaagtagctgagtccgatctggcctgtgctaaagttgtggaggcgctcgagtacgaagggaagggcttgaaggactccgtacctggacaaaagaagcaagtgtcagccttcgagcccttcaaatgtaggcgcagcgagtgaagcaggcacggacagcacgccccaggcaaagcctggcgttaggcagagtagtcagcgatggaccggcgggcgaagacaggcaagcctcgggacgcaccgatccagagtgagaaggcggtgacgacaggctccgagaccaggaaccagaagggccgggtgagactgagcttgacgagctcgatcatcggcggccgctcgagctcggcgtgcgaccggtagcgctcgtcgcccgtctcggcccgcttcttcttggcgattcgcgtcaggatgacgctcgcccgcgtctccttcagagtgaagaacatgaccgggagcagcgctgtgacgaggccgaagaagatccactgcacaactcgccagccggcgctttctgcaacgtaacccatgcagatcgcgccgagggctgccattccgagtcgaagggtcagcgggtttgcgaggcgactgtcatcgcttagacgaaggcacgcaccgatgcccatgagcgcggcagcggcaaagattgacatcggaagaccgcgctcgtcagagcgccagatgtccgctgcaagaaaaggtgcattagaggttagccgacaggccctcaatgaaacgataacggacgcacccatcgtgccgccgaccatcgttgagccggtcgatccggcgatgcccatgatgaagcgagcgacgagcatcgtctcgaggttctgggccagtgcgcacgggataatgaagacttggagtggaggccagtcgtcgaggacgggtcagcctgcgggcccgcacccacgacattgaggcaagcgacgggagcacgacttactcgcaaagatcgcggctgagacaaggtacatgacgttacgccctgcctcttctgcaataggctgaagagcatgtagaaaagcggctgtcagggtcagcagcggtcgcggtcaacagggagcgaccggcccaagagagctgcgttgacgcacagccaggaccatcggcccgagaccgaatgcccaagcgtagctgccgtcggcgcagatgatcagagcaagtcagcgagcaccccagacggcctagacctcgtcagaccagtacgccgacgaaatggtctgctgcgaggcgacgcacacgctgatgccggcggcggcgctgagccgcgaccagcccatgtcggcccgcatgtcggcaatcgcaatcgagtaggaggagagcgcccacgagacgagcaaggtaaataggcaagcgacccagctgattgcccacttcctccggtgggagaagtggaacgggtcgcgggggtcgccctcctcgaagacaacctgcgtcggagagcgagagcgtcagtgagcggcgcacaaacacttcgagaggcagaagcgagaccgacgtagatgacctcgtcccctccttgaccctccttgtcgccggcaatgcccgcgggaggcttctcgccggcggggcctgacgaggaggttgcgacccagctggcggacgagctgccgacgacggtcgccgcctcctcgatagccgctgccgacggcgctcggagcgagcagtcgcgctcctcagttggcgggtcggtaaagaaacacagatcaaagcccgagcgaaccgaggttgcctggctccctcgccttgcgcgttgcgaggtcgggaccggcgtcggctgagtgacggcgagaggtgcggcagcggggggcgcgtcctccgaggtgggctggagcatcggagcaggaagggaggatcgcgctggcaggctggcaggcaggcaggtagaaggtcgttgctagccagaggggaatagagcagccctgtcggcaggccttgcttcttctttgggtcgtgcgtgcgtcagcatcgattatcgactcgtcgggcagccccggcgcctgactgaccagcaggcgtccctcttggccgcggccggccggctgcgcggctgcgggcatgcggcggagatgcacgcgcgagtgtcgccgccgaccggcccttcgatcgacgacctgtctgactcgttcgttgccggggcacgagagatggtgccgctcgactctgtgagagggctcgtttctcgccgactcttgcgggtccgcgatgactgtcgcgtcgccgccgccctgtcacatgcacgcgcttcgcctcgagcgcaacatgatcgagttacccgcgccgatgacccccaggaaacctgccctcaaacgttgcttccaaagctcatctacaagcatacaacaggcagcgggcccggtcgggcgcgcaagcgcctctcagccaccgcctgggcccgacgagccaaagactgcgagaggcagacgagaaggtcagcattgccggtcgaagagtcgagccgactccgcgacggcgccactcacgctggaggatgttgtccatgaactcgtcgtcgccgccccaggtagctgggaagtccgggatggcctggccgtcgtcccacgcctggaacagtggtaggtcgaccgggacggccgtcgctggttgcatgtcctgccggagcgggaccagcgtattctgaccgccgaccgcctggtgggcgccgttgctgctccggaggacgtcgcgaaggcggaggatgattgcatgcgaccgatcggcggcggcaatgacatcgggcgaggcccggctctcggcaagcggcgtctgcgagttgacgggcggcgtgttgagctgcgcgaggccgtgcaggacggcgaggccgagctcgaccgcctcggatgcctgctggtcgaggactggcgggtcgagaaacgtactcgtgtcgcgaccgcggaccctctgcgagatctgatctgtagggtcaggagccggtggggctcagcgcggcgcggcgtgagaagggaagtcgagcaacgctggacctacaagcgaggatcaccaggcagctcgaatagctgtagccgaggctgaacctgaggtcacgcatagtcgagaaaggttcgtcagtattcttcgttgcccgtctggtcgggccgcagatacccaccaccagctgccgtgcatgagcgtgaaccagctcgaagcgacgaggttgaggagctcgatcgccgttgcgacgcactcttgcgcgctgcgaggcgcaaaacggagcagaggaaagcgtcagtctagagcctgcctgcaagctgctattcggccggccagacgcacctcgtccggtaaagcgccgatcgcacgctctgccttcgcagatgggccggcgtgctcgccgagatgctctcaagcagtgcgggtcgatgcaggaggatctgtgtgttgaggaagcggccgcggaggacgacggcgagcagctggcgggtaaaggacaggtcgagtgagtgcgccggccgaagctggtgcgggacgccgtcccagaagtcgagcaggagcgtctcgtgctcgataagcgaggacgggtcgttgcgactggggcgagcgtcaaaaggtggaggtcagcgtccattggaagcacttggaccagcagcaggatcgcacctgccgagcgtccgccacttgatgatgaagagcttgacggtctcacggaaaaagagcagccggttgccctcgtacggcccaccgagcgcctcatcgtcatcctcgccgccgatccagaggagctccttgtcaaacgtatcttgctcttcggcctttgtcgccgcccggtaggcgatcgccgacgaggtcgcttgcatctggcggcaggcaccccagcagcggcgccgcatcgcccgctcggttcgagggagcgcgctgaggtcgaccgcgatcaagctgcgcgagaggaaaatggtgtgcgcgaccgaattggagctcaggccgttcttctgacagcttggggggaagggagggaggcggtcggtcaggctcgatcagagcgaaggaagggacgtgtccgacgtacctctggctgtaaaagcagaggagcaggaggtagatgagcgtgtcgagatcggccgtcaagagtagttcggcccccgtcagctgggcccgcgcaaagtgccgggccgcgagctcctcgtcgccctttttggaccggagcgtggccgagatggtgaggacgagatggagcgttgccgcgtgaaccgagctctgctcgaaagtccggtcggcccaacggccgaagaaggtcggccagtggacgacagggtagactgaggggccagaaaggggtgcggggcgtgagcgtaatggtctccctcagcggctatagcggtcgagagcgccgcgcgcagacgaggcgcaccatattggactgcacagtgggcggtggtgacaaggtcagctttaacgcggctcgacaagggtatctcaacattgggggagactcacagcggatgaggtaccagtgtaggaggctatcgacgacgtgccgctcgagaaggtcgacgggcgcgtcctgcagcatggtctttcgtgtcagatcgatgtcgcctggtcgctaccatccagtggtgggcggcccgcacctctgagtcaccgagcgcttcttgcggcgtggaatctgttagagagtttaggcaaggcgatcagctggcagggctcgaatgttcagagacgggtccccatcaacgcacggctcggccctgcggctgatggcagcagcggtggcagttgcggccgaccattgggcggcgtctgaccgacgaggatcgctgccgccttctcgattagctcggccgcgtggccgtcgtctgtgcgccgcagggcgagccaagcaagtcgtcagcagggagagaaggcggcgcattactcgctcgcttgcggaaaacgacgcacgaccggtccgttcccaggtggatgccacggtcgagacgcggagcgatggcagcctgagcgtcggcggcgacgcgtgcgagacaccgtagatcgacccgcccgctaagcccgagcccgccggcgtaccgctcgagcgggcagctccagccgtcgacgggaggagcggggcagagaagacggcctcgggcggctggggcgagatggcggccgaggacgagagcgaggaccggtcgtgggatgcggcggcagccgaggcggcctgctcaagctcgcgcaccttgttctcgagcttttggacgtacctggaggaacagtaggagaatagatcagtcagcttggatgggatgcgcttgaggagaggttgaaggacctacttgacgctaactttggcgtcggggtagcagcactcctcgtcgtcctgaccgcatgccgagcacggctgagcgccgtcgcactgacgggtcggaagagaagcaggtcagcactcggctcgcacagagacttgagagacgaatgagccgaccttggtcctccgtttccgacacgccactgaggccggagggaaggggaggcgaaaggagcagggtcagtcggagccgggccgagatcaccggtcggcgagcgcagcatgaagacaggtcaaagacgcacggcaggcaaagcccgtccgcttgcgcttcttcttctcgggctcggacccgccctcggacgtagcggccgtcgtcgtcgttggtgccggaggatgggctcgcttgggcgccttgcccttgacggccgctgccggcttgggcgccgggtcgcgcggcgggaacgatgagggctgaggcggccccggctggtgggtcgaagcacctggcgcggccgtcgaccaggcagactggggcaagggaggcggatgctgctgctggtgatgcagctgaggcggtgggtagccgtatgggagcccgttcatctctgggagaggtcggggggtggaggtcaggcagcagcaggggcggaagagagttcgaccctctctctcgcgctctcgctctcttactctcggcgttcgcggagacgacgagacggatgctgcacggccgatgccctccgtcccttcgcaccctccttcgacctctggcagcagcgacggccgtacctcttcccgagatccgacgacagaagacccacccgccccggctagccctcccaacctcactcgctgcaggtccgtcatgccgcggtcgggtctgtcatcgtctcctgtcgatcgccttgcttgctcctgctgcgcctggcaagctctcgtcacgttcggccgagctgtcgagcagcgctcatacaccctcgaccaccattgcctgagagcaagagctccgcaatccagaaggacaaggcacgccgccccctgagctcatcacaatcacaaggtacgagtcgctctctggtggccggcactcggttgcccatcttcatgacaggcgcgcacgcggcgtaggctgaccgcgcccgctccctcctgccctggcctcccgcccaacacagcttcctcccgactcattctctcgacctgccagcaagatgatgcacacgccgacatcgtcgacacacccgccagacgccctgccacatccgcaaccgaaccgccgatcgtacctcgacgaggacgggtacggcttcactcccgctccgaacgtcgcgggcggaggcaagcacgcctaccatgacccctacgtcggcggatcgaccgccggaggcgatccgtcgtgggtgcgcgcgcccgactatccgcctccggccgaggacaacgcctatgaccttggccagcagcgaggccaactgctctcggccgccggcggcagggacggcccggcttaccgcggcgcccacagcgacgtcggcagctcggcctcgctcgggccagacgactcggccagcgtctatcgcacggcgccttacaatgctggaggcgaccagcagggctactaccggccgccctcgcacctctcctacgtccccgaggaggaggcgtaccagaaccggccgctctcgtcctacaacgaccgggcggggctcgtcgacggcgcccaggcgttcgccggccatcccgccgccgacggctatcgccacaacgagcagggccaacagcagggttacgcgcatggcgggctcgatggcgaggctgaggatgcctggcatggcaagggccagcgcttcggtgaccttggtcggtccctgtcctctcttgttcgccagcgtgactgctacgcgtacgcctccctccctggtcaagcaaactgaccggccccccctctcgtcaccccgcctcgtcggcagagtactcgaacccgccccatctatcgcaggaccgatcgatcccggttgagccgacgtttacgagcctgagctggggcgagcgcgtgctcgagtcgctcggcatcggcgccgagaagcgcttctcgctcgagacccggattgagaaccgccgtccgttgcctctcttagctcattcgcccgacgtttcgagcaatggctgttgctgacgactctacttatgtcgctgcctaggccgtggcgtcggacgacagcggcgaccctggatgacctgggtgctcctgatcagtgcgtaccggccgacagctcaatcctcgcacgaccgctgagtctcacctcgacaccttcgcagccatggtcgccgtctttgcgtacgagctcgcacgtaacagcgcgctgactggcagcgtcatcgcaatgaagccgaccttcaactggatgggttcgtctcgcgcaggtcgtcctgggcgcgagctgatgccgtctgctgacgaacggtcctgtttcttcagttggcccgagcagtgcgacgctgatcaacgtgggcgcccgatttgtgccgtgcatgaaggtcggtcaagacccggctcgaccaatctgcgctgctgctgactgccccccgcccccccgtctcagcctgtcgccgcagcccctctggactacccggtcgcgtgcttcaatgagacacgaagctcagtgtacgttccgccacgagtcgatttctccaggtatcgtcgctgacagctgtcccatctgttcgaagcccgacgaacgaggcctgcacgcttggctcgtactgcggcctcttgccgaccgacacgccgagccagacctaccgctttttcgtgcccatcgtccgtccaacctcctcctcgcgctcacagctctatggtgcgctactgatcgacccatctcgccgcccaccagttccttcacgccggcgtcgtgcatctgttgctaaacggcgtcgtcctctgggtcgccggcgggcagatcgagcgtgagattggctccctttcgttcgtcgtcatcttcttcgccggcgcgattttcggcttcctctttggcgccaactttgccctcccggccgtcccctcggtcggcgcgtcgggcggcatctttgcgatcaacgccgttgccgtcgtcgacctcggcctccactggaagctcgaggcccgaccaaagctcaaggccatgttcctcgtctttgagctcctgctcatgatcgggatgggcttcatcccgtacctgattgacgtgagccccctctctttctgcatgtgtctctcgcgtcgtcgtcaagctgaccctcaatcttgtcgcgccaaccagaactttgcacacctcggcggctttgcctgtggcctcctcctcggcatcatcctctagtatgtgcctaggtgcttctctcgcgacttgacttgcgctgattgacgccccccttctctcgcagcccggccatcgcgctatcgaaacgggcaaagatcgtcgtctgggtcctccgcgcagcggccctcgtcctcgtcgtgctcgcctttgtcctcatcaccattaacttcttcaaggaagacagcgccgctgcctgttcttggtgtcgttatctctcgtgttcgtcgctgccgttgttcggctagtcacgtcaagggaggatgactgaccctccgtcgtcgtctcccaaacaggcctgcctgtcgctgcaacaaacttttgcaaaggcagtggcctgccacagatcacgaccagcaagcggtcgctctttgagctctgaggcgcctccctctgccgccctcgctctcgcttgcctctctcacacggaccttgatcctcctttctgcccggctaccattgtattctgccttcacgcttcgcccggggttcagactgtcccagccggacacgatgcatgttctgcgctacccagctctcagccttcctagcgctgcgatccagtctgagtgccgactccaagttgtacgcacctgcgccacttccgccgagcgtgtcagcccgctcgctcgcccgcgcgaccccccgccctggctgtcgacctcgacctcaaccttgtccttcggcttcctccctcgccccttccgctgctcttcagtctcctctgtgaggccaactgggacaggctcgctagataatccatgctaacgggcttccctaccgtgtctgccggacgatgctcctccctcctacggccaggcctcccccgcctacccagctcggcctcgtctctccagctcgaccttacccaccgccgatctccacgccttgaggcgccgccaagcctgtcaagcccgccgcgatgcctgccgttcccgccctcgagaccaacacgccgaataggacagacctttggtggctgtcgacggatgacggcgagagcttgtgcgtgcctgctgcttccccgacggccagctgctgctgcctagacgagctctgccgcgcggccgtgcccgctcggtcacgactatcctggaccttgccaagtagctgacgaggagctcctgctcgtgcttcaggctcgacatccaggaggacacgaagatcccgaacgcagcgaccgtcaaggtcttgaagcaggatcacacacttgccaacatgcttcgagcgtccgtccggctcctcccaagctcctcgccagcgccgttaagtccttcatgctgaccagcttgacgctctgggcacttcaggcagctgctctgcaactcggaggtgctctttgccggctaccgcgcgccgcatccgcttgagccgcacttcctgctcaagatccagacgacgccgcagtcgacgccgatcctcgcgctgcgaaaggcgtcgtttgagctcctgctgtcaatcgacaacctcaagcagcaggtcgcaaaggagcgcgagcggctcaagtttgacgctgcggctggcggggcgggcgtcgcgaccgccgacgacatggccgagccggcaggctggagtttcgccggcaaccagggcgcgagccagggcgccggctgggggctcggcggcgacatggatttttaggcgggggcgtgatcactcgcatgtacctctagcacacgccagcgcgcttgcgtcgagaattggccctcggaggaacaggtctggctcgcaacctctggtcggcagggcacgggcggtcagagctgagaaggcaaggtccgagttccagtaacgctggcatctatctagggcgctcgaggcgcaagggaaggtcttgagggaagagatcactcgccgccgtcgaggttgccgaccatggtcggcttcggccggccgccgggcgtgttggtcccgccctcgagggggatcagcaggtgcgagacgtcgccccagctctggatctcgcccttgccggtggcgtcgtcgacgacgatcgtcgtgacggacgtattgggcaacttgccgggggtcaccgagggcacggccgtcagaacacccttctcgagcaggtgaaggaacgtgttgaggactgcgtcgagacagcggccggcgtcagcgatggcctctgccttgcgcagacgaaaggacgactgacgaaaggcgccgtgcgagacaaggacgatcgtccctccctcgcccttcgtagcgagagggacgacggtcgacaaccagaactcctcgccccgctcgcgcaaggccgacattgtctcggcatcaggcgagaatttggcgccgttggcgagaaactcgtcaatgtgcatccctgcgtaggagcccatattctgcgaggcgtcaggaggagggtcaggatcgtctcgctgggcgcagcgcgatggagcgacgacgtaccctctcgcgcagccggaggtcgaccgtcagcggcggcggtttctttgagtaggacaagagcgtgctggccgtctgcaggtaggggagcagcgactcatcagcttcgtgtagcaagggcatcagcgtgggctgagacgtacaacggctgcccgcgagaggtcgctcgtgaagacctcgcgccagctctcaacctcgtcgccgtacgaccgagcgaggatgaaggcctgagcgagtcccgtctcattcagacttgacccagcatcgtccttccagccctgcatgatgctatcgaggcgacaggaaaggaataatcagcgggttggccaggtgcaagtgcggctggagggcgatgcgctcaccgagcgaggttgtcgtgcgtctggccgaggcgtgggtgagcaaaacttcagtacggcgccagctgaacaggatacaagaaacgcacctggccatgtcggacgaccttgaccgtcagaggtgccatcgtcgaaagagagagagaaagagagagagagaggagagagggtgcggagacgaccggcgctgcggatgcacggagagggtcagccctgggtcagcaccggcggagcagcagccttccctcgggctcgacctactttgaacaaggatggttaagcgtctactggattctatatgcgaggcctgtgaaggggcaaaagagagcgacaagggctgagcgactgaagcagggtcgacgtcggccggtaaggcggcgcagcgtccgggccgtcctctcctggctcgcccgacaagcccgagccttccctaacctccatccgacctttccttgccccggccttcactcggcaactgctgtccctcccttgctacggtctctctccagggcaagagacgtcactggcgggaacctcgttgcgcgtctctcttctgtgcggcctgcccggacaaccggaagtcttgctggggaccccctctctctctcctccgacctcgcaaccatcgatggccgaccctgcgatggcggcctcgacgtcgaccctaccagaggacggctcggacgactacctgccaaggaaggtctccaactttgcctgcacgtcgtgccagaagaagaagcgcaagtgtgacggcggccggccccagtgcaggagctgcgcccggtcccggtcggccgtctgcgtctacaagaggtcggtcggccctttgtccaggcatagtcgagcccgcttaagagtgctgctgacgccgtgcctccgacgtgctctgctacagcacgccgtcggcagtctacgtcagcacggtcgagcggcagctggcgacgctcaccaaattcctagagcacttggtcggcgcggacggggtcacgcgggcgacgctgctcgacgacgtcccggccgacgttgccgcgctgctcaagagccgggcaaaggcggcgccgagagtgaagcgcgaggaggactcggagcaagacctgccgctcgaggagattggagcgccagaggggccgaagctgacggtcgatgggcacgacagcgtacgttccgcaggttgccgctctgcccccccgacagcaagattgtctgacgttctgtttgcccttgatctcgctcagcgcggcctgcacggcccatcgtccttcttctacctcgagccaccatcgaccgactcgcctgggggcgagctcaacgaggcgcatgcggctgacaacacagaccggctccaggcgacgatcgattccgagtactcgagcacgatggagtggctcggcttcctcaacgtcaacagcttcatgcccgagtatcgtgccggtgcatccttgagcgtcgttcagggcagagcggaacggtcgccgactaacatcctctgttcgctgcccatgcgtcacccttcgtaggcgtctttgaggccttccttcagctccactggacctgggtccagcccttcttcggcttcgtctaccggccggcctttatgagtccgtctgcgatcacgccaagagagtcgcgcctcctgctgacaaactctttgtgcgcaggggaaatgatgacgtcgactgagggcagctcgtcctacttctccatcttcctcctcctctcaatctgcggccatgccgggaggcagagcctcggcgacttcaaccgcatcgaggtcaacgacgacctcgcgggcgcgtttgccggcgcgggcctcaactccgaccggccgcacatggacaacgtcttcctccgtgcgtgctgcagaggcgttcgaacgtcgtgtccgacagcgctgatcaaacctgcgcgtccgaccgatcaggccaagcccggctgctgctgtttcaggagatcgagaaggacgcccagcgtcaaatccccgcaatccagggcctcttgctgctcggtgccaaggagtgctcgggcggcaagatcggccgagcatggatgctcacgtacgtcggctcttacctgcctgcgtcctgtacgcgccgtcagctgactactaaacccctttcgtctccagcggaatggcgatccggttcgctcctcgcatcctgaaccctctgcactcgctctgattgaccgacccaccctgacggctcctctcgcagtatgatccaggacctcggcatccatctcgatggagacgacggcgaccggacggcgagcagtatgccggccaagaaggaggcgatggagatccggaggcgcaccttctggacggccttcatctttgacaaatggatctcgctctacgtcggccggacgccgatgcttcagctcacaaagcgaacgccgccggccgtctttggtccatctttgctcctctgctgatcagctctggcgagggctcgtccctgaccgtttgcctcaccttcccaacagtcgaccggtccgacgataaggaggtctggcgaccgtacggcgcggcatgctacgacacgtacgagccagtcccgggctattcgaccgcgacattcagcgccgcatgcagcctcgccgaaattatcaacctcgtcctgctctttgagtgcgtgcccagtctcttgcgtcgacaggctccgctcgcgctgaccaggctctcgctacgatatcagcgccggcgaggcggacgcggccaatattaagctcgcgcgcgtcaagctgcaggagtggcgtgcgacggtgcccagccacctcatcgtcgacgcctccaacctgccagaggtctgcccgccaggtgcgtctcgactgccgaaatgccgccatcggcaagagcatcagtgctgatcctcagtcgactgcgatcacagcgcacatcgtcagcgtcaagtcagtcgcgcccccgatttgaagggcatgccactcgagactgatttctccaccttctcctcagctgcacggcgctcatgattgcgctcctcatatatcgccgaagccgacgtgtcgccgcgccgagccgcgagtcgatccaggtcgcgacagacctgacggcactcatccggatgaacttcaacgccttcggcgaccgcccggcagtcctctcgcactgctgtccgttcgctcagccatttgcctgcttctgacttccggagactgacccgcgctcacctgcgctgccccaccagactgcatgtacatggcggcgacgacgctgatgcaggcgctcaagatgcgcgacgccaaccgctggccgacccccgaggaggctgcaatcgccgacaacctctcgtggctctttgagcggctctcgtcagcggccgcctcgatccctggtgcgtgcgacgaatgccctgctcttgccagcgtgcctcgtctgactgagtctacccttccagcgctcctgcacccgatcgccgtcctcaaggagcacctcaagagcatcgtcaagctcccgacgctaccatttcagaacatgctcttccaggccccggccgcctcaacgactgcagtccttcaggagcccttcccgcccgaggtccagccccgggcgccaccgctccagccgccgccgtttgccgcatcgtcgacgacgtaccccttcccagacatcaacccggcggcttcaagggtcgtttcccctggccagcagcaggacgaggcaggaggcttctcggacgccgtcttttcggcgccgacgtttgactttggccggccgaacggcgagggcaacggcaacgggctcgacgcccttctgcgcggcatgtttgaagggagcttgcagggtgcgtcgtttcccgttgacattcgatagatgagcgccggcactgacaacctctcgcccccctcacccctgcaggcagcgaccctggcaacacggtgagtgccgcaaaccccggtcaccgctgctttcgaatgctgaccttccccgaacctctggccagccgccggtcccgctcgcgccgtcggccggcacgctcgacgagtttggcgggctcgacttctggcacaagggcggcggcgagtttgccgtcgggagtgagctcggcgaagactatgccgacagcctgcacgccgccttttgaaccgaccgaccatctcatatgacctctcgttgttgatgagtggctcagcccgagagtctcgaccgtcgaaaaccgaaagcaggcccaacctggccggctgcatcggtgcacttgccgcacctcgtgaggcaaaagacgacgaccccgccgcgccacatggcagagggggcgggctgaaaaagacgggcgggcggcttcggagggaagaagggcaggctgtgctgtgctgggcgttgacgaagaacctccctgctctcatccatccttgccctccttcttgtacgcttcctgcctcggtaggagggatggcagccctgctcgctggggagcatcgacgagccatcgtcgcccgcgcgctcggggtgcatcgtcgaccgtcccgggggatttcctcgcgcgccgggcccgggcgccgaccaagcgtactttgtgatcgagcgtcatggtccacgcaaagacgatccgcacggaagcggcctgccggtcgccctcgctctgctttgctgagatagagccgcgccacgcccaggcgcgtccgacaagctcgctaagcactcccgccatcgacgacgcgccaggccggtcccgggaggctcgcataggatcgcaagctagcgacggcgtcccgccgacgacgacgacgagacgatggccaataagccgtggtaccgatccaggtcgttggcctcgcggctaggacggcaagcacatcgacaaacggtcagccgggtcagctgcagcgtgacgcagacgagcaacgagcgcacgagtcaacgcaccggccaaggcgagagcggccttcgtcgagccacaagacgggccgcggctggaggacggacggagggtagcagagcggccggagatggtcggctgggtcctcgagcaggtgaggaggggcctggcagaggagcgcatccgtcagccgtcgaccctcgcgagggcgggaggaagagggctgacctacgggtgcgtcgcggccgctaaagccgggctgaccatgtcgtcgaccgcctccgtccggagcggcagcggcagggcgtgcgttcggtcgccgttttcctcaagaaggtcgagcaggactcgagcgctcgagaaggcagaatctggcgtctgcgcaggaggcgaggaggacgcacgatcggctgcgtaggacgacttggcgtcgtctgcgccctctgcgagctgccgacggagggcagacagggccagttgggtctcctttgaaaggctatgtcgcgtcggcctccgtcgaatgcgctaggtgatgccctcgaccaggatgagcaacaggggagcgacggccagcatccctgttgcggcgccagaagaactcgtcagcttctgctctgggatagcacacgatggcaagtagataccagccgcgtacgaccatagacggcgcgaagcaagcacgagaccgtacacgagcggcgtcaggcaaacgagaacgccaaagcgcgagacaagccatagggtcagctcgccgccgctcggcccgccagtcgtcgaagcgtggacgtagtacgccgtgtacctcacggcgacaaaagcaaggagcaggacgacgaaggccgggaccccgaggatcgggaacaggagcgagagggcggccgagtagaagacagcgacaaggcagagcgcctcctgaagggtcgggtcgaagggcgccggcttagtcgctcggaaacgctggcggggcgtgcctaccccgatgtgagcgaggttgatgagaaagacgagaaagaaggccgacgagaacaagctgtcggtagcgaccgaacggccctgactcgtgccatcggcgaggtcagaaatggcgaaaagctgaagtagtatgcttgtgtcagcggcttgttatccggtgaaggttgaggagtacgcacaatgccagcgcaggtcacagagcagccgccgcaaacgacgaggctgtgaagctagacggcctagaagatgtgtctgagacgggcggtgaccgagacgaatccgcaggttcttcctatgcggttggcgagagcgatagcgaacgcgacgagtagggagatcgccagagcaggcaccaggccgaagactgacaaaggaggcacgatgaacgtcagcagaagcgcatccttcaagagtcgtgacagcacctactgagccaagcgccatagtcggcccgtgatgagagatgccggcggacgcctatcctctgatcgtctccttgtgccgaggcagtcgtcagagcgaggaatgggaggcctggagcagtcaagtgcgcgtcagtgactccactcaaggggcgaacgaaagaggtagactgacaggcacaggcaagcaacaaaccgatgatgtagacagcgagccagaagtaaatgagtgcccttctcggccaacctgccgaaggacgttgcaacgccggccagtcgatgtcgtacgaggcgcagccttcgatcagctgtgcgccgtaaagatggcggacgccacggccgatgaggatgtagccgcggaggttccggccggccgcgatgtcctgccaaagggcagcaaggtcagtggcgacgactcggcaagactcagatgaggcggggcagacttcgattgcctgcacttgggcggcctcgacggccgtgttgagccgcttgaggttaccgcgcgagtcgacgatcgcctggtacgtccgcgacacctgggtctcggtctgacctggcgcgagacgaaggtcttgctctgctggcggcggctccgagccttgaggcaggctggacgagcctgcagaatcgatgcggtaatactcgaccggcgcgaggaacgtggagggtggagcagaagaatcttgaggttcagcatcgcttgaaggactccgcaacaggcgcttgccggccgcagaggcagcatttgcgctcttcaattcgaagctctgcagagataagagagtcagtagagcgtcctcgagcagcggcagagcgcaagacaacgcacctcgatgtaggccgtctcgctctcctcaagaagtggagcgcctgagagcgctcctcgaccagtttgtcaagctcggccgtgtcagggttccttcccagcgagtgtacgacgacgagccctgagcgttccaaagggccatccagcgaatccttgtcaacggccgctccttgatctagcccttgccgctcacaccaaagcccttcgtccgccaagacggcccgcatcgcccgctcgcccatttccggcctggcaaccggcagccagaccatctcaagcccgccgagggtcatcgacaaaaagcgcttgcggtaggtaccgagctggcgggcggcacagacgacgaggaagagcgtcgggagaacgagtaagagggggacgaggatcgttaggacgaggaggcgcgttcgtgcgctcgaggcagacgccgagtggcgagattggtccgtccacacgtttgctcagtgtggacgtcgtaaccggatcgagtgcgtcagaagcctgaggaggctgaggtcgaccaagctccctttcgggtcgaccacgcacggtatgccaatgatgtagagcgggagagcgaccgcaagcgcgatggccgccagaggccgacgatccggagcaaaaggaagagcgtgcggagatggagctgggtgtcggtcgttcgcgaagatcgagagagtgaaggaacggcacgggtgggaagaggaaggagaagagggatgcgtgaaggggcagtgggcgactcctgaggcgacacatttggatcagtgactgagcagcgctacaaacggcgggcgaaaagggtcgtctcagacgtactctactggaacaaaccaccgcctcgcctcatagagcgccgtcgtccggcctcgaacgagcgcgaaggccagccagacgagcgcgccgacaatcacgctccagccggcagcggctgtcgctgacttggcctgtgggtcccactcgccggcacaggtcgggttcggcgagtttgaacgggggacgtcggtcatggacgactctgttgggcttggagcgcgcgagaggcgggacgttgagcccgggagtatcgagaagtttggcaatgtcgaggcggcgagcgaggatgagaagctagccgacgcgagcgaggcagacgaacgcgacaccgacgcgagggacgaaagcgactggataaagagggccgactgtagcgcgcgacaggtcgagtcggttaagaaaaccgacgtcggcggctcgacctgcccttgtcgatgcggccgaccaaagggaggagttgaacgtcaggctgcgtcttggtctcgcgtggccggctgcaccgacgagcgctcactgtcgaggcgagggagtcgtggtagaccgaagaagtgttgaagaaggctggacgggagatcggagaatggtcgagctggccgtcagctctagccgcccactagcagccaaggaaggcaggacgtgcgagcggtgtaccaggctgagttccagggctcggactcgccgcaggcactctgcggaggcagtgaagaagagatcagcgcttggagaggcctcagggatgggagttgacgacgcacgaagaagtggaagccggcgaggacagggggcttgaaggcggccgccgccgaggttgcaaggctgggtgccgtaagcgtcgtcggtgttgcgagcgtcataccggatggctgtagttgggagctaggacagcgagatggctgaacgagagacttggacgaagggagtcgacggcctggaggaggagccgagctagcagctggaaggcgggcgatgggagggaaggcaggcgctggccagcgggcgggtctcgagtacgttgcggtgccgggccagccgagcgaccgaagaaagggagggacaggcggtgttgcaataggaaggatttagtggtcgagctcgactcagctcacgaagatgcttcgagcaggcgagcgtgctcgagaggagagagaagagctcgcgacaggagctgcccctttccgccgccacgcgcgcgctctgctgcaggcgcccccgcctaccgctggtgcccgacgtatggcccgccaagcccgaccgctaggcaagaaggtcagcatagggtgtcctggctcgacggccgacccgtcttccctacctgtgggtcgtcgcccgcctgcagtcgctgctgctcgtctgtggctgcccttacttcctctgacgcgcatgcaccagggcctcggccctcgcgccgcgcgcgaagacggcggccgcctgcctctgcccgccgacgtcgaccaatagctcctgcctctctcatccgaactctctccttccctaccttacttactaatccgacttcgcgcacaatgaggggagaaggtacgttcacctgtctattgttcgctgacttgcggcttcgagcgagcgtccgccggcggcgcgtgccctgcgcgtctcagctcagggcacgtcaacacagctgtcgggcttccctcgagccgctccttcttcgacctctggcagagcactgacgttggctcatcctttggcagttctcatttggggcgcgtccttcttgacgctggccgccgctatctgccaggtcttcactcatgtccgtcacccttctcctcccttaccttccgcttccgtcgaccaacaaaccccctgactgtcggcggcccttcgcctctgctcggctgaacacagattggccagatcaacgacacgacggtcccgcgtcacctgtggatcctcaaggtcgacacgtccggcctcgagagcaggctgaccagtcagtctcgtctttccctcgggcctctctgcccgtaggcgacctcgcagctgaaacacctctcctcgcaggcactaactcgggcagctcgtttagcggcctctactcgacgacgaccaacaaccccgctctcggctcctcggggggcctcaagaacgcctaccgctggggcccgctcggccagtgcgggtttgtcgacggcagcaacgtcgtgtgcgatcagcccgaatttggccagcgctttgagccgttcaacacgctccttgccgacacgccccagcagtacaagatggcgtgcgtcctgccttaccgacagcttcgcatcggatgaccgacgactgaccccgcttgatccttccccttggcttcagcgtctccaatgcgatcccgtcctcgcgcttcaagaacaactacggctcgaccctctcggtcgccgccttctggaccgtcttcctcggtgcatgcctggccctagtcgccttctgcgtcggcctcatcccaagcaagctcacgtacgcggtggcggcggtgctgacagtcttggcgtggattgggctcgcgatcggctcggcggtgaatgcgcttgcgggctgctgcgatgcgtgctgcccgatcagtgctgacctctctcaaacctcatcactccgtacttgcagatttggacggcgctcttcatccagtgcggcccgtttctcccctctgcgctgcctctgcgtcaacccatgtctgacccctgcttcttccttcccatccgaccaccaggctgcgcaacaacgtccccggcatcgcgatccagattggctcgggcttcatcctcatctgggtctcgaccggcctccttacgctcgcgatcgtcccgtacctgatcggcgcgtgcacatacgagcggtacgacgtctactaaggcgttgtcttgtcccctcttcgcctcctgcaaatgggtcaacgtcaaggccgccccacaaagctaagacctttccgtgccggctactctaacctacggacttgcaccccactcgcttctacagccgctcaattggcctcacacacaccttcgctcgctgcaccctttgctcgcatctcgcccctttcgtcttttcgtctgcctgtacacgccctgccattcgtaaactcattcgctcgctcactcctccatcgtttgcaacctgcctgctcgcccataaagctgcaccaacagaaaatgcttttgaccgggctgcactgattgtaaactggcaagcgtccatgaatcgcgagggtcatgagctggtcgtacaaaggtcgggcgtggattcgtcaagctgtcgaatgggcgagacgagggcgaggtcagacattggcggagcgatgaaaggcgacgtgcgagacgggccgcacatggtaaagttgtcgcgctgccgttcaccgcgtcggcatcggcggcatcggtgtcgggacgatcttggccttccgaggcacagggtcgatgtcgccgccgagggcaaatgcattcgggctcggcgcaaaggcgtcgcctgagccgccgaagagcgagtcgtcggccgcttgaccgctgccgcccatgctgtcgacggtcgcccggacgaggccgatgctccctcgcatgcggccctcctcgctctcaaagatctcggcgctcgggtcaaacgtgatcgagccgctaaagccggccattgcgtcgtcgccatcgttgtcgtcgtcgtcgtcgggcgtcatgtcctggacggtgacgccgacgccagcctcggcctcctggatgatgacctccttctcgcccttcgccgcgcgagacgagagcttctcgagcgcggccatcaggtcttttgcgagcgtcgcactgttgggcgggtcctcgacgatcggctcccagccttccggcggcgagccagggggcgagatgagaaagttacgcgtgagcggcgggggctcaaggtgctgggaggagggaaggaccgggtcaagcggcgtcggcgcggcacagtagagccggaggacgagtctgagcaggaacggcggtgacaaggggtcaggctgtgcacgacgagaacgagaggcgccaggccaagggatggggtcatcgccagccgagcacatcgcggagctgcccgagatgcgacgcacttcgagggtaccctgctatgattatctaagcgtccgccagccgatccggtcgccggaatcctagcctgaggtggcgaggccggctcgacggcgagctcgtcgtcctcgcccaggaccagccggtcgccctcgcgcttggcccggccggcggcctcgaacgtcgtgtagacgatgatgacccggccaaaagccctgatgggtgcccaggccctgatctcgccgtacgtctcgtagtgttcacggaggaggctctggagcggcggcgagaagaggaacgggtgcgggaggacgagcgcgagcgtattggtctcgagcggtggagggccgccggtcgctggcgagcgagctggcggcgagggcggcatcggcggcaggtcggacgaggcggctcgaggcgagcgaggagctacgggcgacatgctggtgcgagggggaaagggtgggaggtgggagagagaggaggaggccgagctggttggacgatctctctgccaagctggccgagctcgcccgcccgcccgcgcttggaggcgctgtgacgcgcaagcccctttccggccggcggcggttgccagcaagacgatcaacataggtcattagaggtgtggtatgctacaaagtgcttaagaaagcgcggctcaaggtgcgacgggctgctagtctgtagacggcgtcaagcaagcaagccgcttgataaatcgagcgagcgcgaaaaaccgtccggcttgggtagcagcacctgtttgcagcaatagaaagaaggcggtcaactcttcctgacctgcgagacgatcttagcaggagacgcgaaggagagacgcacgagcagttcgccggccgccagctgctcggccgacattggtcgccaacggtactcgacgccagcggcttcccaagccgaccgtacagcggccgcctgctcgatgaagttcggctccgtcttgagcttgtggatgacgctcgccgtcagctggccatcgcgggggatctcgcccgagtcccagtcttgggcgacaaagtgctcgtccttgagccagaggggcgtgccgaccggcagcgactgcaggaagtggccggtccggacgtcctcggcgtgcaccgtctgatctgccgggaggggctctgctgttgatccgagccaggcaacgagcggatacgaaaggatgtaaccgagccctcggaactgcaggggccaaacggggcaaatgtagaggagtcagagaggccgcactcacaagcagcagcgtaggacgtgacgtacgtaaaatggtacgcccggctcgacccaggaaccccactgggtgccccagtaagcggctgcgctctccgcatggcaagtcaaggcgaaggcgtgcaggtcggtgaggatgtttggaaggacgagcagggactgccggggtcggtcatggcgagcaatcagtcggggagttgagcggggtcaagcagctcaggggagaagcgtacgtcgatgtcggtcttcctagggagcgaggaccgccgttgtgtgtgtaagtcgtgtgcggggagatccacgagcagaggaggaaacgtacatgacgaagagtggccgtcgctcgggcgcatccttcgactcctcgtacacggcccgaaacattgcgtacgtcttcccgtcgtcgccattctcgccgtgcgtcaggccgtcgagctggaggaggtcgccgtggtacgcatgctcggtcgacagagccgcttgcgccgcctctgggtcggacgagcgggtcgggcggccgaggacgaagcggatgtcgacgaggtgtcggtgctccggcgcgacaccagctgcgaggccgcaagcgagcgagtcagcggcctggccgagcgatccggagaagggaaggcaagcggccggagtaggcgagtgaaggctgggaagggagacggaccctttgagagcgctcgccagagttcacgcttgcgcgcctctgacaacccaccgttcgcgtcggtcatgattccgatgaacgcaagcgggttcgagccctcaaggctaaacttggggcagccgaacgtcgtcggcgccggctgggcgacgagctcgcggatctgctggttctggcagaagaaatagccctcggttgaagaggtgcaattcgccggtgactcgaccttgcgaaccagtcgctcaaacgagggtcaggtcaaagggacggacggcaatgcggagccgagcgaggaagtgcagagcgcaacgtcaaggaaagggacggaccgtcgtctcgacccacttggcctcgcggccatagaacggcggctcggtgttgacgacgaagaccaaaccgggcagcagcgtgctgaggccagcgccagctgccgtcgagctcaagagctgatggctccaggcgagcacgccaaggacggtgacggatccgaggctggcggcaagaatgaaccgcgcccgacgtgacagctcgatatggagcgtgctgattgcggccatggcaagcgacagaagaaggacgtcgaggtgtaccgagcaaagagctggttgaccgaagcgagcttttccaagaggaggaacccaccgcaaggccttcaaaggggtgctccgagcgacttccggagggggaccgcagtcggctccgacggacgagggctccggcccatcgattggctggagccctcggcagcgccgtcgaccggccgcagacggccgatcgtctccagccgacctaccatccaggaaaacgacgagaggacgacgtcgtggccggaatggtactcgacagggtctagctgctgcagaagagcaaaaggagatgacgagggacgctcagggaaggcgcacgctgccggtcgtcgaccgggcgaccacgctgaccgtgccctggcccgcagcgtcagcgttgagcctcgacaggaagaggcaggtaccggtcaactagttagttggggcatgctggaaggcattcagcactacgccttgcgaagcagaggggacagccggagatcgaataggctggcgttgcgcgtgagctcaacgagttgctgctgctgctgctcgtccgtccatccaaatcggacacgaggcaggcctgcctatgcaggtcacttgccaggagagacgagcatgacgatgaacgcggcggtgagcgaccatcgcggctgctgcgggcagaaggggaggtcacggtcggcggatggggaagaaggtcgtcgtgcaagtcagtcttgttggagcgacgggaatctccgattagcagcagcgtgcgccgtcattcggctcgacacttctccactcgcctaggcacatcacacagcgaggagccttcgaaacgactcttgtggggacgtgacatcaagggaaaggactcctaataatgctggtctggtggccaggcgtttcctggagcagaacacgtctttatgtgacaggagagaaaataatggcgacagagacgatagcgatatctatgcccactttgctaacaacgccatgagggaggaacccagagcgaagcatgacagggcgtagcagagcttgccaatggaggcggtgtgccagtaagggttgaagatgaactgtcggggggccaaggggcaagtcagtcagtccttctgcgaagccaggcgacttgcgacggttggcagtgacgtacctcgtgagcgattagttcgacgagagccgtgtaaatctgatgaggacaggtacagactgtgtcagaggcggtttgcaaacgactgaagcaaccgtccgagcgcacgtactagaatgccggccgagatgctgtcgaggacgccgctcgcgatgctagccgccgttgacgacatcgagagggacgaccgagcgccgagaccggcagcgatgccgacgggcgtgcatgtcgagtagagaagagcgccagcgaaggggacccagttgaggtgggcgggcagcttgaggaaggcgagacgagagccgagaccaaggccctcaaaggcctgatggaagacgatgacaacggcgctggagagggcaatcgatgtcagccatgcacggtgaagtaggcaggtggaggcttggagcgcacagcgtgttgaactcgtcggtcgacaaggcgagcgtcagaccgatgatgatcgagtgctgtcgggtcgcaggtgcgtcagccgcgtcttcgcttggtgagatgatcgaaggagacgcaccaagacgacgccgaactcaaggacggcaataccgatgatctgagccaagactggcgtctcttcggacgagtcgtggtactcgtcatcgatctcgctgctcgtctctgacttgagcccggccttctcgaccgcggtcgccccggtcgaaggcgttgcttcaatctcgtgctcgtgctgctggccgagcttggcccggtgatgggcgtcaccgtccaggttaatcccaagctgggcaaggtgagcggtgcccagtctgtacgcaaacatctccataacgaagatgaggaagagggagctgcaagggtcgaggcgtcagtcaagtgaggagccgatcccagaggacggaggttgacgcacataaggcagatgccaaaggcccaggggtactctccccagccgttagggaggcagccgccgttcgcgtaaatgctgcaggtaggaggacagtcagcaaagggccagagaccgacaacacagtgcacgcacttgttgccgttgagctcttcatccgcagcaggctccagcaggtgcatgaaggccgtcgtcaagatgacgcccgagccaaagtatctgcagagcgacgggaagcacgtcagcgaccgcatgagtcgttagctggtatggccgacgtactttgcaaactcaaagaccgcgcccggaacgtgacgccggagaaaagggatgcgcttggccaggattgggaagcaggtgcccatgagtgaggtgacaagaatctgaaaggaggacggggtgcgtgagcgagcgcacaaggcaaacgagtagtcggatgacgtacgatgaagagcatgccgacctgaacatgacaagaaggcgaggagcattggcaggttcagcaggggcgggagtcggcgagaaccagaggcacgcacgcgcaagccgatccggtcaacctcgtccggcgtgccgcaaatctccgcgatcgcagtcgcattgccggtgatatcctcgccttcgcgcttgacgaacgaggagacggccgagctgaacatgttcgctgtttgggagaggtgagaagggggagaggaggtgagggccggaagtcaggtcgcccaaatttcggacgcctcttcttgacgctttgtggcatcctgaatgacttatttcgggcgagaggtagacgaaaggagcatgccgctcgggactgatctgaggatcggtcgtcgacgacggagggaggaatgaggacgtccaggtcgaggcgtgccgccgggcgcgacgggcgtgtacggaaatagcgcgtgcgccccctgcctcgagtcgccccggctcttgacgttttaatcgcgacgaggcgtcccggctgcctctgcacgttcgagcctgctagggaaaatccgatgccaaggttggcgagggacgagtctaagtgtcgatcgagcgccaggtcaacaagccgtccggaggagaatgtcagatccgtgttcggagccgaaggtttgatcgggacgcgtgtcatcgataagggccggcagcaacgtcgtcgtctgaggcggttgaggttcaagagggtcccatattatctttcgttcgacgctgaggcgatcactctatgacaatcgacgagcagggggtcagcaccttgctgcaagaggtcgagcagtcgatccgaacgcactctcaaagtggaggatccaggtcgagagtagcttgcggcgcaggatctgggcggggtcaggcctggggagagggtgcaaggtcggagggtcagcgagatgagccagcgagtagagctagagggcggaaacgcacagcgctgtgccgtacgtaaacggcgccaggtggaggaacatgccgacgacggcgacgctgagggcagcaaaggcgacgtaggccttgcgcgggacgacagccttgatccgaggccggagccgagtcgtcggtccggcggccgaggccgggtagttgatcgactcggtcaagacaaagttgaggattgagccggcgaggcatgccgaggcgagatgagccgggaggtagtggtgaatgaagagctggcgcgacatcaggtagaagggaaagtaatggtaggcccaggcgatcaggaagaagccagtgttgtggtaaagccgctcgcggaggtctgcaaggtggacggccaggtgaggagatcatcagtgacagcgcgtccacaagggtgagattggaggacgcacggtcctcgattggctcgacgccgcgtcggcgggcgagctggtcggcgccgacgatgccgacgaagaccgacaggctgaggacgcagatccagaagccgacaatgttgccaatcgcgtagacctgcattttgaggtcattctcggtccaaaagctgatgccgcttaggtcaaacggccagttgaccgggaacgacgcgtacgggtgcgaggccgttaagccggcattgtgctggagcatgagcacctggagctcgaagaactttttgaagaagttcatcggcacgaccggcgacggctccttctcacctgtccggttcttgaagtcaaagccggctgtaagaagcggtagaatccggtcagcggcaaacacatcgcgaacaggcagggcagaggggaggacgcacactcgtccatcaggatctcctcgacgaaccacgtcgtcgacttttccggcagattcttctggccgttgacctcctgttgtttgaagccccagtccgggagcgcgctgccgacctgcatgctgacgccggtcgactcgtgcaccagcttgaaccagccgctcttagtcttgagcggctcgccctcgtggccctcgttcagaacgacgcggaacttggtgtcgttgtagcgggaggcgaggtcgtccttcggccaggtcgtgtactcttggttggtcgtcgtcagcggcgaggcgacgtcgtgcgtcatcaggtacgcgtcggtccccgggtggtagagctggatgacatcgttgttgcgcgcgacccggccgcggccgctctcgggcaggatcttggtcggcatgattgcccagttgttgtttgtatcgttgaaggggtagccggtcacctggcggcctacggatcgatggcggcggcaacagagtcagcaaggttctgcccggaactgccagtcagctggacgacgcaccctggctcgagatgcggccgtcggcatacttgagcgggtagttttcggcgtgtgtatgcagatagaagccagtgtccttgtgcttgattgtgacaatgtcgtaatagcgcagctctgcaaggcggaactcaggtcagccaaaagcgcagagcaggcgacgtcagaatgactcaccctgagcgtgcaggagcagttcgttgccctgcagcgtctcctggaaggccgcgctcatgaacgagtcgccggtgcccgagaactttaggatcttgaagtggatccagaagaatgagaggtagacgcagaacgggaggaggataaggcagctgacgcgcgcaaggaggtgctttgagaattgctcctgcgaatgcaacgcccggtcgtcagcaaaggtcgcaggcgaagcctcgacgacggcagacaaaccatggtgagcggcgagcggcgcttgacgttcatcaggtcccacaggtcccaggcgacggccgtgccgacagtcaggaaggtgaaaaggccgaccatcttgcagccgagtgtgcaggccagccagaagccggtcgccgagagccacatccaccaggccggggtgaaggaccggtagcgctgctggtggaacttgatgtacgacaggagcgaaagcgccatcgagaggatgagggcgccatcgagcaggatcagacgcgtttcgacgacgtgcaggttgtctggagaagcaggaacggtcagcgagacctcagcggggatactcgctggcgggcatcgcaacgcaccgaacaggacgaggccggccgagaaggcagcgacgatgattgggtagccactctcgcgcattatccagtagacgacgccgacggtgagcgagccaaagacggccggcatcgaccgcatcgcccggtacgggacgtcgatccccgcttcgacgtcgaggtacgggtcggcaatgttagtgaactcgaagctgccgtcaaagccggcgagccagccggcgaggccgagcagcattttggacagcggcgggtgaacgtcaaagtaatactcgcgctggatatagtaggccgcgaactggaagagcagggggaggtagagggtgccaggccggtcaacatctcggctccgtcgcgtgtgagctgtcgggcgaaagccgcaccttgccaaagtgaacctcgtcaaagacgacactgttgggccagccgatgccgctgaagcggacgacggcggccatgccaacgagggcgccggcaacggcccaagagacgatggtctctttccgccgccagtacggcttgcgctgctcctcgagctcctcacgcgaggccggctggtgcagctgcgagctcgcgaccgagccgccgagtgaggacgacgaccgctgcttgctgagctgattcggatagggcaggagcgtgtccttctgtcgcatcgcatggagtccagcgtcagcatcggctcgagcggatcctgacgagctcgtcaggccacgagcaggacgcaaggttgccgggctgaaacatgaagcacgagatgcgagggcaagcgacgcacctcggacgtagagacggcagggacctcggcaggctcgtcaaaggtcggcgaattatcgcgcggaacctgtcgtcgccgggcgggcttggacatgctgggcgaggcgaggggtgaggcgggaggacggagggacaacgagatggctgtcaggcgcgacgcaacatagcgcgcctccgccgcgaagaagggcggctcaacagacagcacgaggcttgcaccgagtgcttttctctccagctgctcagatatgggacagcggtgcttcacgcatcatgctagagggccagtacgcgagaattggagcgacatgcgtctcgtccgaataggcagatgagctgctgagcctggctgggcgctgcgttgcgccggagccgagcgcagagacgtgctcagtcgtctggacgactgcctggaggggttggccaggagacgactgggtttgcaccgtggcttgccccaacggtctcgagcgctgctagcagtccgtccgctgtctccagcaggcctcctggtcctggaggtagcgggagatcatgcttctcgtaccagctgctgccgtcgtcgtcgcaccatccgaacgtacggcctcccctccttctcgaacggtacgccttcgcgccgcatacctcttcgctcataccagccctcctgttcggcccttgcatcgcaccagacgagctcgacccgcagctcgtgcttgtctgcaaggttaaacgcggccgagagcagctgcgcgccgatccctcgcccttggtgcgtggtcgccgtcgcgaactttcgagcccggagagcgaggagcgaaccgaggtcggtggctgccgacgaagggaacggagtcgggacgagcgtgaggatcgcgacgatctcgtggggtggctggccgtcggctcggaggggcgaggcgagcagggcgccgaggtggatcgtcgacaagagctcgtcctcgggcaggacgacgaaagccggcggccggtctggccagaggacggcgtgccggagggggatcgtctcggaagccgagagccggacgatggagatggagagcgctgagaggggagaggcttcggacatggctgcgatgcgggtggatcagagcaagagcgtcgagcgctcgaacctcagagccggcgtcacgaccgcacaggcgtccgtgccggccagcactccgaccgacggcgtcgcctgtcgtaggaccgtcatcagaagagcgccgagcgtgttcgagatagttgatcatgacattggagcacctcagatggcgcccaggaggaaggctagcggcgtctggaccagccatacacgctcgcccctgcttgagcgggtttggggtcagcctaccaagcgcgcttgctccggttctgcttctccttcttggccgcgtacttggcgtaggccgagtagccgaagccagcgatgacgacaagggctgagacgcactcgacgttagcttctttctcaggtgcgctagcgacgagtgcgcgagcgagagaaggcagacgacgtaccgatgcccttgaggaagaagaggaaccagctgacgccgccgccccctcgaggcttgtacgacgagcctttcttcttcttcgtcttgacgccctgcgtcatcgggttgttggtcgtcaggatcgccgacgacgacgagaccgagatgatgctggaagggatgaagggggcgagtcgtcagtctgatggctcccagggtacttctaacagccagcaggtcggacgtactcgtggtactcagacacctggcccgtgagcgccgtgaagccgaggtaagggttcgccggcatcgtcacattctctttgaagcacgacgtccattcgtcccaggctgaggcaaagagataacgagggtcagcggatgagctggatgaagctgcgttcgagcaggggcgcaagacggacccttgtagtggagctcgagctggaggtagctgcccttgatgtatgtcagccgcgccttcgttgcgacgtcgtccttcgagcggatgtttgcctggattcggagagagtcagaatgtccgtaccgagggcgagcaagcctgcagatcaagaggccgcaccgagcagcccgcaaactcggagacggcgccgtcggtcgcgtgatcataatttcgcttgccatcgcccatcatggcgctgatgcgcgggaacgtgtacgagtggcgcgaattggcgtacgtgtcgaagaagatgccgaggccgttgaactggtctgcaagaggaggagtcagagaaagcgagcttcagtggccggctcctgggccagaatcgggtcagggaagcgccgacctttcgagccgaataccgggccactggatgggcgagcaggttgtcagggtcgtcctgccagcgacagaacctaggaggacgtacggctgcgcacgctcttttgtgagccacattccaaagccgtcgccaaagatgaccgacgccttgctgtcgacctgagagcgagaacagccgtcagcgtcgagcggaatggccagtaggcaagatcgagagccggccggaccttgaactcaaactcgacctggtagttcgtgctcgtaagcggcaagcgcgaccagagccagcccatctcgctcggctgatcctgcgtcagccgaacggccttgtttgtgttgatgattgtgtcggccccaaagtcccaccaccggtctataaagccgggcaggcacgacgtcaagtccagtctgagactgactgcccagattagagggcgacgtactctgcaagtccgagtcgacataggctgcgcagaggagggaaggcgggaggtgagcttgcggccgcttgcacgcgcctggacgctcgacgctccgagcgacctgccgagaccgactcacgggcatagagcgagtgtgtccgaagcggcacagtctgtacgagcggagagaaaggacgggcgtgtcagcccgctgatcgtcttgtagcccccggccggcgagcgccagagcagggccggaggagggaaggcgcgggagagggaccgaccgtctcggcgtgcggctggacgagcgtcgacgggtgggcctttgcggcctcggctgccggcagcaagcttgcgagcaggagcaggaccgatccgaccagggagcgagacagcatcttgccgggagagaatgagactgtaaggtagaagagggcagggtgctggtcggagggagcgatctcgccgcgtcccttttggcgcgcaaggcgaggcgcgtccgccggcgcgtcacaaccgagccagcagctgaagctcgcccgaccttgacctcgtcctgtcgggcctgccctttgacgagcccagtctagcagtcaggtacgagggggactgacacacagcgtcgctgatcggctcattgttcatacccaactgcgtccagtgcgtccgaccaagaacgacctccctcccgcgcagtcgagcctcgacctcctcaccctcgcgcctgcgttgacgtcctgctttcgaggctgaggacgttcagctgctgggcgttcgtcgctctcggtcgcgtcgcttattcttgttcgagatcgagcgacgacgtggaacgacctcctcgagccgtcgaccggctgcccgtctcgcgagctcggcctgccctctcgccagcagcatcttcgccggcatggcctcccccgagcctgtctgctacgtcaccgacgcatgctgttcgacctcagctcgaatgtgcaggaagagcggccggagctcgaccttgcgtgaaagcaacacggccggcgtgccgagtcccggtcgatacgggagcgccaccagctcaccacctggacgtcaagccggacgacgcgggatagactagcgagctcgcctctgcgcaaggagcgtgaagggcgtcgtccggcggcgggcacgacggtcttggcctgggctgactgcctactgaccgcctgacctcgtcctctctccctcacctgcgctcgccgcctctcccggtcgatgcgggacccttgcgctcgcgcgctcgccctccgtcctcgaggcctacaagaggccaggccgacctcctgctctcctgccctctttctctcattcgccctctctctcactctctccctcccgccctccaacccaaaccactcaacccccctcgacgccttcacgatgctctttaccgccgtcctttccacgctcgccctccccctcctggcccttgctgcgcccctcgagaagaagggcaacaacgcccgcttcacctggtacgacaccgaggtcggactcggcgcctgcgggaacttcaacgagaactggaagagtgagtgtcgtcgcccgcgcaccccgcttttttctcatcggctgacgaactctgctctgtctgccctcgcagagacggtcgcgctcaacaccaaggactacaactcgcttggtggcggctacccctcgggggcttgcgggaagaagatctggctctcgtacaacggtcgcaagctctgggcccgggtcagtcttgtcttgctcgacgtgcgccttcgcgacatcgtcgcgctgacatgtcgtccgctccctcaggtcgccgacgagtgcccgacgtgccccgacggcggcgtcgacctctcacgcggtctcttcagccagctcgcctctttggacgacggcgtcatcacgggaagctgggggtggtcgaacaaggcgaagtctcgcgacatcgaggaagccgaggatgaggaggccgagggcgcggacgacttctagacgaccccgtccctcctttttctccctcactcaaaaggcacacgcccaaggaccggctcctgggcctggcgtcatgcacacgcacccctcgtaccctcttaccacttgtgaagctctgccgctttgcggcttcccccctttgtattgccctggtggccccccgacttttcgtcctcacgacgtgcgcagtaacacgctagacgtgccccgtgctcgcgatggacctccttatgacatagagtgcccatgatcttctgctagacctggacaggagatagtgcagacctaaatgaccttgccagatgaaggagaaggtggcattcgccggctgtcgctggcgacgcaggtcttcgttgtgctcgtcgtccaacccctcgtcgccgcggccgacgccggcgtgactcttgccgcccgacgtcaacccttctcgcctgtcgcctctccctctacacctctcctcaacttgcagcaatgtcgacgctcgctctcagcagcgcgctcggctggtcttcgatcgcctgctggatcgtcgtctactcgccccagatcatcgaaaactggatgtgcaagagcggggagggcctgtcggtcgccttcatcgtccgtgagtgtctaccctggcccggccttctcgagcttcgtactgacctcgctcgtcgagcttcgctccagtctggctcatcggcgacctcaccaactttatcggaggcgccatggtcggcctgatcccgtcgctcgtcctgctcgccgtctggtacaccggtcagccaagttgcttgggtcgtagcatccggcgccgagctgacctccgatgttccgtctttgctcctgctcttcggctctggcacctgcagtctgcgacgtcatcctcctcttccaggtctactactaccgccggctgtcggctcgggccgctgccctgaccgaccgcgagacgcggccgctcgtgcccaagtcggcgccgaacgagccaaccggctgggcgaccaagacggtccagttcgccggcgcgctcgccctcgtcatctgctttggcctcgtcgcctggtgggtgactgcaagtgacgagggccacggctcaggcgagcacacaccggttgacctgccggtcaagttcgagtggaagagccagacgctcggctgggtgtcggccgcaacttgtacgtcggagctgccattctgccttgccgccttacctcgctgatcatattagacatggacccgctcccgctacagatatcggcagccgcgtgccccagatcgtccacaaccacaagacgcgctgcgccggcctctcactcgccatgttcttcttctcgatcaccggcaatgtcacctacgtcgcctcgatcctctttaagagcactgacaggcgctatctgctcacgaatctttcgtggctctggtgtgtctccctcgccacctgtcatcctcaatcggccggccagctgatcgactgccgtcctcgcctctacagcggctcgggcttgactgtcttccttgacatcatcgtcctgctccagtttgtctacttttcgcgccaggctcagccgctgttgctcgccgccgtcgaggaggaccaggagtagagcgactgtcaaaacggaaatagatgtgtgatttagtgctcggacggaaaactcgcacaagggttgggtgaacgagccgaggcctgttgtcagacaaaggggcacaagtcaagagtccttctatcgagtcactctaataagacaaagatgggccagtttacaaagaggaggttgtctagccgaccattggatatcgggcacgcaggcgcgggccatacttccacatgacgagcggtgccgggacggcagccaagctgacaaacgccatcaggctgccgccccagccccagccgagcgtccggaacatctgcgggccgtatatcggcagaaggcaggcgaggatcgaccgggtgaaggtgataccggcgatgccggccgcgctgtacggcgccgtgtaatcgacgacaaaattttggatcgagttgaaggcgagcatgaggctggggtcagagacggttcacgggcggtcagcacgcaggttgcaaggcggagctgacatctcgagacgtacccgtagccaccgattgcaaggccgcagagagggccgaaccaatgcgtttgtgcttgggccgtccagccaaacaagagccagccgacgggaaactgcggcaagtacgaaccagatgagcgcgcaaacaagatgaggcgaagcagacagagcacgcacaaagaacatgccaatctgtgtcaagacgagctgtgcggcaagggttgcgtcagtatcaatcacgcgccactgcccgcagagaactcaccctgtactcgggttgacccgagtcgccattgcgagtgcagaggtaggcgtagatgcggttttgaagatttgcagctgtcgtagcggctgcaaagaagccgatgcctgagagggagcgaaacgtgcctgtcagtaacgtagcaaggtcacgacaccgaagcgcatcatgtaccgagaccgatgaagcagagtggaaaaattccgggcgaccagccgtagttgaagaggccgtcggaggttgccgatgctcgctcggcggcaaagagcactgggacaacgacgatgaggagatagatgcaggcgtagatgatcgagtagtagacggcaaaaaaggcgaggacggggttgcagagcaaaaagcggaaaggccgggcttgagagtgcagagggacgtcagtgccggcgtgctaaatgaattgttcacgagccgactcacagaaggcgttccgaaagacgaccttccagtcgcgcttgcccgagaggccgacgacccagccccatcgaccgaacttgctctcacgccgagcttcggctcctcccgggtcgagagccgcctgttcggcgtgcgcaatcttgaagcggagggcaggggcgtacgtctcggacatgaagaggaggatggcaacgccgttgagagccgagatgatggcgagggtggcaaacgaccaccgccagtggacgagcgacagccagccgccgaccatgctgccgacgacaggtccggccatgggtcccgtcgcgtaaatcgatattggcttgccgcgttcccgagggctaaagacatcgctaacggtcgcgatccccagggccgggcccgacgaggcaaagacgcccgcaatgaagcgaaggagaatgagggccggcatgctgtacaagcggtcgttgcgaatcagcgcgagcgtgcggccgaaagacatccgaaggaacgcacctcggagcgatgatgcaggcggcgttcagaagagcgtacggcaccgttgacgagatataggcgctctgacggccgtagagctccgccgtcggggcgtaaagaaacggaccgcagccgaggccgagcacgaagaaggccgtcaagagcgtctggactgggtcagcggacacgcagagagagacgacgtcagcatgcacgcgacaactggagcaggccaacggatagtattcagacctacccttctctctttcttcgccaaagtgctggccgatctgcgggctcagcggcgccgcaatcgagctgcccatcgtcgacagaaagccagtgattgaaacggttagggcaacgagccatttcctcttgcgcggccagttgagcgggttggccgggtccgactgccagtcgaccggaattgggctgccgacgtccttctctgcccggagtggagagagaccgtcgccatcgtctgatactgctggtgcgacgagagggaggccgcaagcagtcgtgtgcgtcggagctttggtgggctgacggtcatcggcgttggccggcgccgagggcgagctgcaggagtcgggcggatcggccgccatgggcgagatgaaggagaccactcggacgaggacgatcgagtgtgtttagagcggaccggcaggacggcgtctaggaggagaaggggtggagggtcgtggtcagggtcgaggactgaactggtgcttgcttgacgtcgtgccgagctgaagggctcgcccggcacaggcgcagcaccggccttcgccccgatcagccggccctaggagccctggacgctcgtcgacgacccccaacgacgacttttcgcccaacaagcaagcttctcgactggccaatatttcacgtacgcttttgccgtgcaccgctcagcctgggctcgacgtcgctgggcgtggtggtgggctgaccccgagctcccgccgcaactggcagctcctgcctcctccagctctcgctcgcccgaccagaccgcttctcttggccggccgtcgtcatgctgtaagcaacctaggccttgccgtcgacgccctcgccagcggctgacgtcctatcgatctgaccacgcaggtctagccaggcgaaggctctcgcctcgggcgagtcccttcgtctcttgctgcgctcccggacgacctttgccatcgcgtacacgcttctccctcccctctgggcctcatccagcccacagctgacccaaggtaccgctctcttcagctcctttgcctcgcttggtggtctcctctttggcagcaatcagggcattatcgccaacattctcacgagccacgacttcaaagaacgctttgccctcacacctgtccaggtcggctggctcagtgcgtcgtacaaagcacttcatgtctccacgtcgtgctgaggctgacctcttgaacgactcccactaattgcgactcttgctcagcctccatcctcgagctctttgccctcttcggcgccctcagctcgtcctacctcgcggcgccgctctcgccgcaccgaaccctaatcctctttgcagccgtcttcctcgtcggctcggccgttcaaaccgccgccaactcggccgacatactcacggtcggccgtgcggtcggagggttcggcatcggagggctcagcacgctgacaccgctctacatgagtgagtcgagcgtcgccggtgaactttgcgtcggcctcgaagttgagtcagagcaccgccctgcaggtgagatctcgccacccgagacgcgcggcgccatcctatgcttcgagcaattctcgatcgttctcggagttgtcgtcggcttctggacggcgggctgggcgactcggacgagttgagtcgcgagccagatgaccgtcccgcgctctctctctctgtactgacgcttcgtctcgcgtacaccccgtgatcgtcttgcagtgaccggcagcatctcatggcggctgcctctgctcctgcagatggtgccggccgtcgttctcctcgtcgcactcgtcgtcttcttccccttctcgcctcgttggctcgcagctcagacgtcgcccgaacgtcaagccgagggccgtcgcgtcctcagccatctacgcggcaaggcggtcgattcggacgaggtccaggacgagtgcatactttgcttgctcactatggctttcaggtcacccgctgatgacgaccgtccttgccgcaactgcaggtgggcggagatcctcctcgaagcgcgtttcgccgccgagctcaaggccgagcggcgcggcaaggccgtcggtctctgggctgacctcaaggcagacatgtacgagtgggccgaactctttgagcctggcgtccgcaaacggacgctcgttggctgtggggtctgcatcctccagcagatgtccggcatcaacgctctactttactacggccctatgctgctcgaggcgctaggcctgtcgggcgacagcgccgtcctgcttggcagcggcatgatcaacatcattcaggtgcggcactgtcttcgcttttgcaacagggtcagtcactgacccgtcgtccacctccttaaagctgctggcgacaatccctcccctcctgctcatcgattcgctcggccggcgaccgctcctcatcgtcggcgccatcggcatgacgctcgcttatgcctgcatctcgatcctcgtctggcgctacgccgacgactgggcaattcatcagacggcggcttggtcgagcgtcggtggcatctacctcttcacaggtgcgcagattgctaaggacaactgtctaccccatggtaactcgcctgacgcccgcgacccgcagtcttttacgggatctcgtttggtccgatcgcctggctgctgccgtccgaagtctttcccgctagctgtcgaggaaaaggcgtctcgttcagcacgtcgtctacatggtgcgtcggcttgtccgaccgctttttgacagcaggctcctaactcttgactcgcaccgcagggcctcaaactggctcgttggcctcttgacgcccgtcttgaacgactactcgacgctggccctctacctcttcttcctctcgtggtgcgcgctcgcactcgtcttcgcgctcgtggccgtccccgagacgcggggcgtctcgctcgaggagatggcggccgtcttcggcgactcgacagctctggccgacgatgagcggcggacgtggatcgcgcgcgagattgcggccgagtcaacagccggcagagacgaggagcgccgtgtcctgctcggcgacggggagcgagcgggcagcgggtctgacgagtctgttgggccgtcctgatccgcgtgaacccatatcatgcccatcattcgctctcgacgaggggatcgcttctgaaatgcaggggcatgcagaggtacaagtagcgcagtgatgcaaaggagaggacagcaggttgacgggggattctaggaggggggtaacagaggctgaggagcggcagcgcgagtcatgcggtcagaagtgagtgaatggatgaggagcagcatgtagccgagaaggagggaggcaagagtgtcccgaggagtctaaaaggagaagagagacctagatggtaaagtatacgttgatgagggcaaacgttgcggccgccggccagaagacgcgccagctctcaccgcaccaccgcgagagcaggccgtcgcggccagggttgactttgccccggtcgtcgccgctgcagcctgctgcagagcggaggtcgtcccagagcgagctaaagaagccctgctcgccggcagcgatcgagagcgcgcgcgagtccttctccgacatgcgtgtgacgcgccgggcctggcctgggcgggacgttccgaggccgagcgtgctgccgttgttttgcgagaggccgaggccgagcccaatcgacgacggcaggttggcgctgctgccgttggcgctcggcgttggcagcgggaggaagtaggagttgccgatggcgccctcctcgtcgaccgggctcgccgattggctcgactcgtccgcgtacccggcgtgctgtccgtagatcgatccgccattactgccggcagcaaaggcggcagcatcgctctcctcgtctggcagctcagagacaaagccgatccgcggcgagccgaagggcgaaggcgggaccgaccggctcgaggcccggcggaaggtcgacgggccgagcagtggcgtcatgccgcccatcgccatgagacccgtcgcggggatccgtggcgacttgagcgcacccatcgtcgaggtccgccgaaccgggttggggctgatcgcggtcgatgacgaggttcctccgaacccagcgctgtcattgaggccgttcaggttcaggtaggccggcctgcgacgcttgaacgaccggcggacattgacgacgagcaggacgacgagcgtgaggaacgcgagcgggacgtagatctgcgagtagatgcccagctggtcgggcaggttgcagctcatgtcggcgtgcgtcggcgccgacgggtgctccgggtcggccgggacgagcgagagcatctggaagcccgggtgggtgatgcccatgccggtgctaaacgtcttaaccgtcacctcgcgcacgccgttgctgtgggtgagctcgcagacgtcgtggtcctcgcccgagaaggcgagcgttggccggatgttgttcatgataaagtcgctcgtctcttggccactgggagggaaagaacagcgaacatcgcctgtcagtcatcggcaggctagtctcggaacgcaagacgcacaagagcttctggtagccaaggccggcgtcggccgtcatgaagccgcgctcgcggttcgggccgcagtcgacgcgctccggccggtagagcgggacgtgcgacatgaggatgcgcgggtggtgcggctcgactggcagataggaaaaggggtcagcacgacgcttgggctcaagcagaggtgtggggtcggcacacactttcgcccagctcgtgcacaaacgtgattgtccccgactcggtgtcggcccactcgccgaagcggacctgcgcggcgtagcgccggtagtcctcttcgatcatcccgggcgcgtcaagcatgacgaacgtgtggttgccgaggtcgagcgtgtaattgattggcccaaaggcctcgcggtagcggtcgcgggcgcgcgtgtcaaactggcgcgagggcgcgaggccgacgtcgcggttgccggggacgtagaagatgggcggcgcgtcgggcgtctcaaagatggctttgaagtggttggcataggcccagtacctgaaggtcggggtcgaaggtcgggccaaagagggtcagccgcggcggcgcacgcgcaaggagcacgcccttgcagggccactcactctccctcggaggccacctggcggccgctgtgcatcatgtcgcccgtgataaagacggcgtcgggccggaagcgctttgcgaccatccagctcttgcggaggaacgtgtcgaggataaactgggtgatcttcgaccggaccggccggcggacaaatgtcggcgcgttgaaattgatgacctgggggtccgagatgacgaggacccgtgtcgagcgcgccggtcgcggcctcctcgatgttgactaggagagatagagggagtaggaaggaagggaggatgagcaaaggcgtgtgagcatccgcgcgtcggctcgcctcgctcgtgtgtttccgagctaaggctctcgcccccgcctggccaaaggacgcaccttgagcagccgccgctcgagcttgccccactggcacgtcgatgcttgccagaagaactgagaggacacgttacggacgaacgggcagagaacgaccaaggcagaagggcaggaagagtcagggcctagaggacgggaggcgaccggccgagcaagcaacacgccgccggatgcaagcccggcctccgcgtgaaagactcgagagacgcacctcgccaatctgctcgcgagagagtgaaggtcaggcggtcagacttgggacggcttctgtcgacgggcaggggaacgggcggccgtacctcgcaccagatgaccaggacgatccagccgaagcgcaggctgaggttcaggctctgagacgcggccgagcgccgctgcttgagccgggacgacgagccgggagccatggctgctggcaaaggaaggcgacgatggcggaggagcagcagctgcacgaggacgagtcgatcgagaaaccgggcgagagaacgggacagggaaggtggtgggcgtgttgacttcagcgtgaaaacggctggcagcgagcaagaggggcgagggagcgagcagccgcgcagcgcaacggagaagggaggcgtttgcgcgcggggctcgattgagtttggtccccacggatcgacaacagcaaggcctcgaccggcccggcctagcaactttttctttccgcctgaagaggtcgctcgcaaagaggtcacgacggtggcagagcgaggcagagggcagaacgaggatgaagcagaagcaggcagaggcatgtcgtcgacagacttcaagtctgggaggcgcagagccgggcgcaacgaaaccctatcaatggctttccgcagactagcaagacaggagtagatgcaagcggggtgcatccaattgacaggcaagaacggtagaagcaagcatccggacgacctaaagatcagtcaggcgcgccaaaaaccgctacatttaccagccggaggtggcagcgtcagcaggggtgggctgggcggcagcctcctcggaccagtcaccggccggggcgtcagccgaccagtcgatgttctcggtcgacggctggacgttgagctgggccgggacagaggcgtcccagtcggcggcggcggcctccggggcggcctcctcggcggcggcagccttggcggcggcggcctcggcctgctcgcgctcgacctcctcggggtcgcggtagaagaacatgtcgggcctggaaggaggaagggctgtcagcggatggacgagagcaaggcaaagaacggaagaggaagacgcggcgacgtacatgaccgaccaggcctccgagcgggggagggtgccgcggatgcgaagcgtctcgcgggcgaggagccaccacatgagaccgatcgagtgcttcgacttgttgttggtcgggatggcgacgtcgacaaacttgaggggcgcgtccgtgtcgcagagggcgataacggggatgttgacgaaggccgactcgcggatcgcctggtggtcgacccgggggtcggtcacgatgatgatccggggctccttgaacgaccgggtgatgtagttggtgaagttaccaggggtgaagcggccggcgatggcagaggcgccggtcgtggacgcgaacttgaggacagcccggtgtccgtaaggacgggcagagatgacgcagatgtcggccgggttctcgatcgaggcgaggatacgggcggcaaggacgatcttctcccacgtcttgccgacgttgatgatgttgacacctgcagagcgacgagacaaaaaggtcagtcggctgttcgatagcgttccgacgaggcggcagacgaaccatcagcgcggcgcttgaagacgtaaggctccatggccttctcgcagttcttggaaccgatgtggcactgggccgagatgagcatctggatgtcctcctcggtggcctggagagcggcgggaaggggggtagaggcagccatttttgtctgtcttgtctgcggggaaggagaagagggacgaggtcagcgccgagcaagacaaggatgggctaagcgacgaaaacgacggtgcacagctggctgctaacgctgctgctgctgctgtagtcagtgtcggcaaaggccggtcacccgaccacaagggtcgtccgcgagcgaccgagctcgtctgggacaggtcgagctctctcgggcccgacccaagactagcgagctgtctgccgactctggcgagactcgcctcgacggccaaacggcagcagcagacagcccagtatgagcagcaagtggcccagccgtatgcagccttgagccaagaagaagagggtacgtactgtgtacttttgtcttcgctacactgagagtcagaggggcaggcgggcgagggccagacgacgcttttcgcgaggcccgacgagtgaaaaatcctaaaggggcacggggatcgatgcaggacaggagggaccgacgggccgcagcgagtcgaccgccgcttgaacctcgctcgaccggtcgaccagcgctgcaacctgcttaagactgactgactgacggcgccgctgactgtcctactcgagcatgcagggggcgagacgctcgctgactggccttaccgctcgcatggccacgacctccggtcggcagccatcacgcctgcccgcaggtcactgcccttgatctcgctaattcgagcgtcgtcgccggtcgagccagcggcctgtcttcagtcgccgaacctgacttagttgaggcctgcggtccgcggtcgagcgaggccatctgcgtgtccctgcctgccgacgaacatctgctgtcggctcccagactcacaggcgcctctcagggagacgagtcaagcacccgccgctacaggcgctgccaatttcggccatcgttgcacgctcgacatcccgcgcagtcctttcgcccgcgtcctggtggttctggcggccgcacacgcccgtcgtgcgagccagcgagctggaccttcgaagcgcgccagtcggaccgggtaagctgctgcagtcgacacgccccttgccagacccggaagcgacatcctgctcgcctgatggaggccaaagaactgcccggctaccgctcgcgcactcgccccagcgaatccgacgtcgacctggcagaggcagtctggcagctgcggcctggcaccgcttgttctctgacggacagcttctcctgacgactactcgttgatttagacgaagcttcaggttggtctgctgcggcggctcgcgcctacgtcgatagaatggtcccgtcccgctcgcccacaggtttcgtggagagggaaggcggtggcgcacttgccaggacgagcggcccattttgaccgacacgacggctctccggagcgacggtcccgaacgcgtctttggctcgtaaaaatgctaggtctgagcgaaagcagagatgggtcgttctcagcagccgttgaagcgagatgtcgagcttggcatgtcggccctttgatgcgtctgggctgcgacgagaggggtccgaggagggcttcccacgcagaagctggtcacccgccgctcggctgcgacccctctcctctagctcagccgcccaccgcgccctccgccgaccatcacctctcagcttctctctctcccgtctctcctgctgctggctaccactttcgtcgccgccgccatgccctcgcctggatcgtcgtcgtccgagcccttctactgcgaggtctcggccgacgccctcctacagcagcagcaccagctcctcctacagcagcagcagcatcagcagctggcccaccagccgctcgccgggccgtcgacgtcgctgctccagagcgtcgccggaccgggctcggccaacggctccgaagacacccgcgataaggacggcaagctcaagcggacgcgcgagggctgctacacctgcaggaaccgcaagtacgtcggtgtcgctcgtccgagatgaagggcccgcctgagctccggccgtccctatctctcgcaactgaccacccccttcgggccgcccttcgctcttgcccgcctcgcagaaagaagtgcgaccaggtccggcccatctgcggcagctggtgcgtgtccctccccgaggctatcgctccctcggcgagccaagcattctgcgcggacactgcctgcaagctgaccgagcggtcgttcctctgtgctgtgcctgcttcccatcttcagctcgcgcctctcattcacgtgcgagttcccgcctcagatcgtcaacgccgacggccagctcgttaccgttcgtcagcccaacaagcgcaagaaggatcgctcgagcacggcaggagctgccggcggcagcggtgctggtgccggcgggagtgccgacggccagagcgagggctcgctcgaggccaagaagcgtgtcaagacgcaaacgggccctcggccgccgggcaaggcaccggtcctgaccgctgcgtcgacgtcaggcggtgctggccagaacggcatcggcggcggcggcgtcgggccatcaccgacggctggcctcagcagcttgaagagcggtctcggtggcccgtccgcctcgcattcggtgccatcctaccttgcttctgccgcccagcgaccgccaggccaccatcggacctactcgaccgcctcgtcgggcatcgaccaggccgtccggcccgtcttccaaaatggctcgggcggcaacggccatccagaccacccttatccgcaagccgaaggccagtatctgcaacaacgggccatgtcgagctcgtcgcaaggctcggcatcgtctggcttctctctgcgccaaaactacaacccggatcagcttcaaggctcgccgaacatgccgacctcgctcctggcgcacgacagcagcgtcggcggccctctggccgtctcgcacgcgacgccggcctctaacgcgggcgatggccttccggtgaatggcggcggtgggtgcagctaccaggcttcgtctgatggaggcacgggcagcatccgcgatcgcttcgaccacatggtcgccctccagtcatcgccgatgcaggccgccgtccccaacattgccttcgacgcgccgccaggccagcagcagcaacaacagccgccgcaacagccgccgcaacagcagcaacagcagcagcgtcctccgccttcgcacgcgagcatagccggcacgcccaacctcttcagccggcccttctcgccattctcggcctcggccaacgcggccgttggaaacgaccctgaagcgcacaaccgcatgctgcaagagatgcaccggcagttccagcagagcttccagcagccgacggcagcgccctcgccgagcttcagcgagtggatgaagagctttggcgacacgatggactcgcccggccagatctttggcgacgccgcgctcaagccgagcagcaacggcatgggtggcaatacttccggctcgggtggactcgatgtcagcggcttcaggccaaacgtcaacggcagccaggccgactcgccaatgacctggctcgcgccgtcgcctgcaccctcatcgctccatctcggcatgtcgcagacgcccgtctaccagcacagtcatctgcaccccgccctccagtcgtctccgctccaccagtcgcagacgccgctgcaaccgctacccccgctggcgccgaccaacgggacgaccggcctctcgcagcagacccagcagcatcagctcaacttcgacggcagccgccttggtaacggcggcgcacactttacgtccagcgccatggccccgccccggaaaagtggccagcacatgtcgccacctcagatttccgggccgtcagcgtcgaacggcctcgcgatgaacgcaggcaaccgatcgtacgcgacctcgagccatggcacgggcggcgggtcgcagcatcacgtctcgccaccggaggtggcctggcagaccgagtctctcgaccccggctacgggccgtcggcctttatcgagcccattcctgacgagaacgactcagatacgcgcgacttcatcaatggctacaccgatggcgggcctttggcggccggcgcctctggcccgggctcgcccatcgtccgggctggcccgaaccggtcggtgacggtctcgtcacggctcgccccgcccatcacgatcaagctgcccgagctgccgcagatgattgccgaccaggcgccgctgctcatcgactactttgtccgcaagctctcgccgctcatctcggtcctcagcccgcgcaagaacgccggcgccttccagccggcatccgtctcgctcgtcggcggcagcgacattgcctcggtctttgtgccaatggcgagccaatccaagctgatggtgcgtcgggccgcgcatttgttctcccttgccccttctgcggcagctgatcaaccgatccccgatccggccatcttccttagctcctgagcgtcctcggctggtcctcgatgcatctgcacgagctcggcgagccctggcgcgagattgccgacctcttgcggacccagcttgtcgaccgggtcgagaacgccttcatcgcctgggaggagaagaagggcccgcataccaacgacgaagagatgctggctagcctcgttgccctgagtgagattgaggtacgtcggacatccatttcccgtgactcgttggtgcactccacttgctgaccccccttttcgccccttccccgcctcagatctgccgcggctcaacctcaaagtggtatcggccgctgattatggcccgacaggtcatccggcggatcggtggcgccgacaagatccgtaagctcaactacaacacgaagtggctgctccaaaactgggcgtaccactcgctgctgtcaagcaccgactgccttgacggaccctcgctcgagccggacgagtacgcggccatcctctgcggcggcctgtcgtcgtttatgggcccgtcgatgatcgtctttcagattctcgccgagacgtcgcgcctctcggtcgaggccgcgcactgcatccacagcgaccgtgacaagcggatcgaagcgctgcgcgtcctcgcggcaaaggacgctcggctcaaggcccggctcgacgccgtctaccccgaattcccgccctcagaggacctgacgacgcctgagacgtcgtaccacctggccgccttccgctgcttcgtcctcacggcccggctctacctccggcaggttgtcagccactgcaacgcgcactcgctcgtcacgcagctgctcgtcaatcagctgctcgccaacatcggcaacgtcgtcggaacgccggcagaatcgtcgctccttttcccgctcttcatcacgggcgtcgacgccacgaccgaaagcgaccgcaagatcatcaagggccacttccttgtcatcgacaacaagtccgttccgactcgcagctgctgctgccgcatgataggcctcgaagttgacctcgctgtttctccccatagctgccgcatcggcaacatccagacggcctacgcgctccttgaggccatctgggaccgcaacgactttggcgagcgctgggtcgactggccgcgcctgtcgcgtgagctcggctggaacgtcagttttgcctgaggcgtcgctgctgccccccacctcatctctagaccacgcctaccctgcatctgtctcaattcttgtactttctcaccctcaccacaataggccagtccttggctcactcttgcatagggcgcctcgcccgcttccttcctctcatcgtaaaccctctcttatcgccagacgcacggcgtctcgtcatcctcgctcgtcgcctcgtcctcctcgaaactcgctcaaagccccggcggggtgcctcatgttgtcgcttctctctcggtttgtctttcgaagggtcaggattccagcgagacggagggcgaggctgctggtgtgtctgtcatacgcatcattgcggttgcggcttcttgcgtgaacgccagtcacgacggttccagaaggcgttccgtttcggcttgaccggcatgtcggcgacaccatcccactctgcagaagattggaggcagggtcagcaagaacaggccgatgcagcgagatcaatcgcagggcgacgcactctcaagcaggtcccagtcatccttgagcgttcgcggccggccctgcagccggcgagaaagttggcgttaattcccagtcaaggatggtcgaggagacttgacgtaccaggtccgggacggggatgcccatctgactgaaggtccgctgacggtcgcgggcggccgcacgacggtcggccggactgatgtcggcctcaaactcctccatccagccgttgccaaggccggcaagactgacttgcgtcgtcgcagccaggttcaagctgtcacgcggggacgaggtgccggcctgttcggcaacgatgtcgccgaggaggtcggtcatgccagtgttggaggcccacgacgccggagaggacgcttggccgggcgccgttgaggggacgacctcgcgcgcgccaacaagcggcgtcggctcaaattcggccgttccgtacgagggcgagctgtcgccgctctcgtcggtgaccggccgcgtctggcgcagaccagtgtcgccggcctcgaacgagacgtgtccaaagtcctcctcgccgccgaggatgcccttgatgagctgctcctttgcaagagggtcgatccgacgctcgggcttacgggcggcctcccagccctctcgggcctcgatctcgtccgagtactcaacgacccactttttgttcttgagccgcttgccgctctcgtactcgggcacagagacgcccatggcgccgagcatgccggccgcctccttccactcgacgtaggtcagcttgtcgatgccagagatgacgccgttccggacggcaatcttgttggccttgtgggccgggctcaggtggttgataccgcgctcgcggacggtcgcaacctttgaccgatgagggaaggcgtcaccctcctggatgttggcagtgtcgtaccagacctgcttgccgagccgtttggagaaggtggtgcgcttgatcgttcctgcgagtgggacagcggagagcgaggaaggaggatcttgtcagagtcctgccacacttgcggtaaagtcaagaaacaaagacaaaccatcagccgagcagaggtcaatctcgctgtggcccttgcggtgaatcggtgctttgaggacgcgcccccactcgccgatctcgcgtcgaagcttgctgtagtcgaccgccggccgctcggccgcgccctcctcgccttcggcgggcgcatcaggggaggcaaaaattccgtcctcgccctggacagcgacggccccctcgcgctcggccttggcgaggcgctcctcgtgcgcgacctcgccttcgcgaccctcgccccggtcctcgtccgtgatctcgggtcgcgtgccgcgtcggaggatgacgtacgaaaagttgagacgtgactggtcctgcttgacgccctttgtcagacgggtgacgaccggcgtctcgagcagctggctgaacgcgcacggcgtcggtgtcgaagcgagcgggcacttctgatcatgcgggcactgttttgacagcagatcagagagagttgggtcagaagagagagagctagacgcggacaaaggagcgagacgtacgggggcgagaacatagttgccgaggagccggccgtcgtgaacgagctccttgccgttggccgtccattcgacggtctctttgcccgccttgacggcagcgtcggcgaccgcgtcgtcctcctcaaactcaacaccgttgaagaagaacttctcgggctggcgcttccgggtgatgtccgtccggccggggtcgatggcaagcttgcttgacgggctgctgctgttagccccctctgccgccgcagaagtcaagacctgctccgtggtcggagccgaaggtcgggcgcgctcgccaggccgccgcctgcctcgcacgcgaggagcaatcggcgatgactcaggcgcctccgtcgacgcctcagcagtcggtcccgttgtcagcggctcgtccgactgaggcggcgccggtgggacccactcgccagccttcttcacagcctcctcccgctcctctcgtccgatgccaaggaggaactcgcgtgcctcctcgacggccgtccagccgtcacgatggcccatctcgacgacgacgaccgtctcgacgcccgagtaccagagctccttgagcttccgccgccgatcgcgcgggagcgcaagcgccgacagtgcaaaggcgaggacgccgaccgatttctcggcccggagccggggcgcgcccgtcgcgttctggtacttgttgagcgaccggaagtagagtgtcggccagcgggcgagcgggccgggcgtgtcgaccttgaggagctcgcgcgagaggtgactgacgagcggcgagggctcgatcaggacgagcgcgttgcgtttccctcgcggcgacgggagggtcgcagcggccgcccaggccgtcgcgccgtagccggccgcgaaatcgacgatctgaaggccgccctcggcgccaggcgcgtcccagccgtttcggctctggagctcgcgcatgatcgtccgcatgacggcgtactggctcggaagctcggccgccgcatgcgccagaacgagctcgggcgtcgtctgccggggcatgagcttgagcggctggagcgttagatcgagcacgcggcccgtcctggatgtgaccttctgcttggcgacgtcgcgcgggacgaggttcgtcgaggccgacttcttgggcggcggcagagcctgcggatcgcggtgctgcgcgtccggcgctggtagaaatagttgaaaggcccgcttcgtgagagccatgtcttgctctggcattacgaggggcgcgagaggatgccgtcagtgcttgagtactcgtcgagtgcacgccagaaggcgggagcgggaaggggggggggctccccctcccctctctcctcctgcacttgcctggcccgcccgcagcgcatcacgatcgccgccggcaaagccgcgccgacgccgccgattggccccgccctcggtgcaaaaggtgtcaagtcgatggacttctgcaaggagttcaacgcgcgctcggcccacctcctccctggcacgccctcgccgacagcgatcaagatcgcgccagaccgctcgttcaagttcgtcatcaagacgccgaccgtctcgtactttctcaagaaggcggcaggcgtcgagaagggcacgagcggggtcgggatcaagggcaagaaggcgatcgtcggcaaagtcgggctgaagacggtctatgagattgccaaagtcaagcagacggacgctcacctcaaggacgtgccgctctatgccatcgcggccacggttgtcgcttcggcaaagagcctagggatcgagtcggtcctcgcctcccgactgatttcttgctcggcagaagcttaccccgtcctctcccctttttgccccctgcctccaggatcgtctactgatgagcatgacagatcagaacagaagtttcacgccatctgccggaagaggaccgtctggtcaaacgcctcggcggggaggctcgtgagcgcccgcgagagcgttgccgcagagccgccgtcgaccgccgcgtcgtcgggcgggagggcgagctggaggaggctggcgttagcgaggtcgagcggggcatctgttgtgcgtggcgccggcggagagagcagtgtctcgtcagtccgaccgccctgggcgagaaaattcaaagatgactgggcggcaccttttgcgaggacgccttctagctgatcgagcgcctcggcgagctttgcctggtctccaagcgctgaacgcgccctcagatccgccagcatcgccctcgccatctcgcccaccgcctcacttgccccagggccgccgacgacaccgggcgggagggcaagcggcgcgcgcgaggctgcgaagaaggccgcgaacgaggcgaggtgggcggtgagcgagcagaggagggcgcgcgtcgtcggttgccagacgacaaagtcggtcggaagcggccgggcgtcttgcgggagaaagggcaggtcagcgagagccgacttctccgggcgagtggcctagtcgctcctcacctttggccacccagctgtcccagctgctctcgacgaccgacgcgaggatcagacgctcaatcgtcccttgcgccagttccgtctcgcggatcagcctgaacgcggcgtctagaagcgagcgcaaggggacagagcgagtcagtcgatgtccctccagccctcttgctcgcaagagagcggcacaaggcacgcaccgagctgatacgctggctggcgacctgtccgcggccgcgagcagcagcgctcaaacgcgctgttgtgtcttgcgagcgtcaagatctcgtcggcgacgtgctgccgatctgagccaatcgagcttcaaggcgcgatcctccacgctgtcagtcaacggcgccgaccagaacaagcaattgtaaagacaacgcaccggtagagcgcgtgctggagcaggacaaagagcagcatccagcgcgagcgaccgatcgggctcggctgagctggcaagcccggctcgagcgcggcccagcactcgcgcaggacagcctcaacggcggcgactgatgacgcaggcaggaagagggccaatcagcctctcgcgcgcaatctcgtcgaaaggaggggacgcaccgtcgtccgatcgcttgcgctttgtcccgccgccgacgagcagcgcccgacggagaggcagcacccgaacgaggtcctggacgtccgatccacgatggagcgcgagtgccagcgcctgcccgagccgctggttgagctccgcattgttttcggcgtccgaggcgcctgcaaacgccgggtgcaggtgaaagttgacagaagacgtgcggtcgctgaggcgggcaacgaatgaagcattcggcgtcgcggcaaagtaggtcggaactgtcgaggacaggagtacgtgagtttttgcagaggtcgctgccgctggcgcaagctcgggcacaccttgatggccgaggcgaggatcgactttcaggggagcgctctccggcgccgatgcgtcctgcagagtggcgctgcacagccggacgagaggctgtcagctcgacgatctttgccctcagagaaagagaaagaaacgaacaggtcgatcaccttgaacgagcccgcgcagccggccggccaatcgccgttctgaatctccatcacgagcacagacgactctgagccctggatcggctcgagcgcggtcaggaccgacgagggcaagagccgcgcctggcagaacaaagccgtctatgcgatggacaaagcaagcgcacaaggtcagctctgctgctggctgaagggagacagaagcggcccgagagacgcacctcgttgccgagccctgttgcagtctcgagcatgggaacagacgccgcttcgagctcggcaaacgcccgcgacagctcgcttggggccttgtcgatccgccactggtggagctccgatgccggtcggctgggctggccgtcgagagtactcggaggcaggtcggccatgacggcgacgaggccgagggcgcgactgccggcggcgccagctggatctgaggggacgacttccgaaaaggccaggtgtgaaagaatggcggaggccgagatttcgggcgaggatgcgagcgggatcgatgggtacgggtgactcgagagggctgcggcagcgccgagttgaaagtcagcgagctcctagagaggagcgccggcactcgcaagggcaggacgcactcgtatgttcgccgaccaggaagtcggccgtgatctcgacgacctcaataaaggtctcgtcgccggacggcagctcctcctcgctctcctgcgcgaggggcaaatcgccagccgcgatggcatgcgtctcgtctgttgccgtcgcgtcagggagcggcgtcacgcccgtcaggtttggcaggtcgacgtcgatgccgaggccggcgaggatctcggccgtccctgttgcgccaccgggctggacgatgctgccattgcgagtatcggctgcgctgccggacgaggctgccggaggaggaggaggcaacacggtcgagtgcatcgcgaggtagatcgagtcgtctgtatgcaaaagggggcactgccggtcagacagctgggctggcgtcagggcagcgctgcagcggacaagacgcaccattctcgcgggtgtggaacctcgcgcgccggacccgacgtcgccggcgcctcgcctcttctccaacctccgactcggacatgagcccccaagtcgccgagccgggcccgtccacggtgcagcgggtcgtcctcaagatgacctgctgcgagccggcggccatcgtcaacgctgggcccggtgctgtcggcgggtggtagagcgtcacggcatgcgcagccgagagggcgacaaacgtcgggtgctgcgacgggaggagcggcggcccgcaccgcgcacgacgcgcaaacgtcggctgcgagctcttgccttctgcactgtcctctacgcccgaggccgccctccagagtcgcggtgcgccgagccaggtgacatcgacaacctcttcgccctgcgggcaggcccacgactcctgaagtttccagtctgccggcgcgcggcctttcgtgccattcagcgcccagagggcgagcgtcccgccttcgcccgaggccggctgcgtccagctccaggtcgagcacgaagctgcgcctgagggtgacggcgcgagcgggaagaaggcgagaaagtggtcggatgccggcgagaacgagacaaacgtcgccgggaggtgcggcagaggaaaggacggcagcggcagggcgaaggtcttgtgtgaagatgaggtcttgtgtgacgatgagttgccaggcacggcagcgttgtcgatcgggtagcagaggagcgagacctttggcgtcggcgacccgcttgcatcccgactggcgcgatggacagacggcgcgaagacgacggcgttctgcgaggagattgcgagcgggctacgagggcacgggccgagctctgaggtcagccttagatgaccagagcgggcctctcgctcgcaaaggcgtaccgtgtttggccggcgagagcgagatgctcgtagacgtcgctccagagcaggccctcccggcccaggggctcgcgctgcttgcccttctccgacatgccggtccggggcgcggggtgaggtcaagcctgtcaacggctttcttgcggctgggcgagagtagctctcttgtcactgcacgacctgtgtctgacgaccgtgctacagagatccgagtagagatgggcaagacggaggagtgagggccagacggagcttgcacgctgtcgcctgctggtcgagcttcgtgccggccgccgacgcaagtcacaagctcgtccgagcttcgcctccctttgctcctctcaaccaccactcgcctctctctctctctcggatcggctctcctgctcccttctcaaggcgaagcccgcaatggcttcccccagcgcctatgcaacgtctgggatcggtggctcgtcggcccacctgagccctccaccggcaccgccgacgggcagcccccagcactgcgccctgctcgggccgctgtcgctgctcgtccagtcgctcatgctcctgctcgtcctctcgtcgctcctcgtcaagcgcgccctcgagcaacccaagcggccctggcggatctttgcgctcgacgccagcaagcagttcatcggccaggcgttcgtccacaccgccaatctcatcatctcgagcgtgcccgcctcggcgccgccccgacgcggtcagacgacagcgaccgccgctgctctcgcagccgtcgaggccgcaggaagcagtcttgtcgtcgccgctgcacctctagaaccgacgccgcccgagggtgtcaatccgtgctcactctgtgcgtttgatcacgcgcctgtcgtcgacaaacgagatcaagcgtgctgactgagcaacttgtcctgcagactttctcaacgtcctgatcgactgcacgctcggcgtcgttatcatctgggccgttctgaggacggccaagtacgccctcgtcagccggctccaactcgagggttgggtcaccggcgtctaccgggcgccctcggacggcagccgggtccgcgttcgctggtgggccaagcagtgcgcgctctacgttgcctcgctcgtcattatgaagggcgccgtcgtcgccatttttgcgctcctgcccgtcatctttgattttgggtcgtggatactcgattaccttgatcctcacgctcaggttgtctttgtcatggccctcttcccgctaggtcagtcgtcgccctacttccgctctcctattctgtcttgtcaaccaagcctgctgaccatccaagtcatgcctttgcgcttcagccatgaactgcctccagtttttcctgatcgacaacctgctcaagcactcggcctcgtcctcgctcctcgactcgcccagccactcgccccgaccagggacctacgccgccttgccgacacacacctcgcccgccggctcgccctcgacgctcggcggctctcagacgctccagcgcgaggcgtcgtacaccgtcctcgcctcggcccggtcgcgcgcagcgagtgcggccggcagtccagcctcgccctcccacccggcgctccctcagcagcagcagcagcagcagcagcagcacgcaatcaagcgcgtcaactctgcctcgacgcgcgaaggcgaggcgtgggcgcgcgagtgggacagcacacgatcgccgacgctccggccgggtgacgacaatgacgacgaggagaagctcgtcgacgaggagcgtgggctcgggctcaacattgggtcgagagcggcgagcggcagttgaccggatcgtctggctctagcgatgtcctgttgtacaccagtccggttgtcgcggaaagagaaggacgcgtcatgcgtgtcaccgggaggaaaggctatagagtccgagaggaggaaaggaggtctagcgcaaggggggggggggacctcaaccgagatattccatcaggttcttgacaaacgtatcgatcggctcgcggtcctggcgggccatctcgacgaggccgagcagcttcttgacgccgacgttaaggcccttttggccgagaccggccccttcgagctgctcgagcaggcgccgctcgtcggcctgcgagcggaagaagtcgacctcgcgcaagacgtgcgtgaccccggcgagggtcgcgatcgacggcacccggatcgaggcgtcaaaggcctccgagagctccatgtcggccagcatcggccggttcgaggtcgtgcagatgatgaggagccggttgccctggagtgagcgcgcgcgagagagaggaggaacccggtcaacgttaagtatggcctgacgttagcgcatccctgctcggccgcaccttcggaggccgcttgctgatgaggacgagcagcgcctggaggacattgtttgagaagcgcgggccgatcgggacccagtctggcgatgcaagatgcaaagggcggtcagcaagctcggccgaccgcgagagggtagcgagggggaacgtaccgaggatccgctcaatgttgtcgacgacgacgacgctcagcggcgacttgtacgagtcggtgaagaccttgttgaggtaggcgaccttttggtcctcgcggaagccgaccatgttctcgggcgagatcagcttgatgaacgggaagtcggaggcgagcgcgatcgtcgccgcgagcgccgtcttgccggacgaggccgggcctgcggtgccgtgccaaagatcatcagcgacggtcacgagagagggaagacagcgacgacagggccacgtaccatggatgaggaggctgacgagcggcgtccgctgactcttacggacttgctcgacataaagcgagccgtccttgagcgtcgagtcgactctcgggtcgtagtggatgatgccgttctggacgacctgctggagctccgattcggagacgccaaacgcggcgtgtacttcgtcgagcgcgagcatgaagtcgccccgcatgacctgcatggcgtcgaggtcgtttgagatgccggcgacggtgccgacctagaacgtaacaggaaaaaggccatcagttgattgcacgtcctagagcgggaagagcgaaaccgcgtaccttgatgtgccggttcattgcaaacgaggtcgcactcttgatcaggccgccaatctcggcgccggagaaattcttggtgacgctggcgagctccttgatgtcgacgtcggcccccaagacattattgagcttcatcttggtcgtgtggatgttgaggatctggagccggccgtgctcgtccgggagcgagatctccatgtggacctcgagccggcccggccggagtagggcctcgtcaatcatgtcgagccggttggtcattccaatgatgaggatgttgttgagctggtcaacaccgtccatctagcgagccggagagaaggcgcgtcagaaagtgagcgtagcgagatggctgacggccggggacgacgcaccttggacagcagctggttgaccaccgagtcgccgacgccggtcccgccgccagttgagccacgctgcttgcagatggcgtcgagctcgtcaaagatgataatgtggaggcccgagtcgtcgcccttggccttgtactgccagagggaagggggaagggcagtcgtctcgtcagcagtcaagctccacgccaaatgggacctcctccggaccgacctccttctctgcgtcctcaaagagcttgcggatattctcctcggacgcgccgacaaacttgttgagaatctcgggcccgttgacaatctttggctcgcgggcgttgagcatctttccaatctgccgggccatcagcgtctttccggttccgggcgggccaaacaggaggagacctgggagcaaaggggggcgcggggggcgcaggggtcgcaggtcagcatcgaccctccaatgcgcaagggagcgagtaaggacagacctttgacgtgctggatgccaagcttttcgacgagcgacggcgggaagatgcgcgaggcaaacgcgcgccggaagatggcgctaaactccgagtcgagaccgccgatgcccatgtcctcaaacttgaagttgggctggaggatcgcgttcggcgggggcctgaggcgcaggcgcaggcggagtcaacgagctgaagcgcgacctcggcgaagggcggctgagcacgcgcggactaactttttgcctgacgccttgatcttgatccggctgccctcatccttccggacggtgatttcggtcgactcggtcaggattccgacgctgacattcttgacggcgtcctggtccgagctgagcgagaggtcgaggacggccagcgtccggacgagagccttgagcgagcggccgcggaagtcaaagacgagcggctgggagagcgagagcgggaggccagagtagcgctgcagtcgttcgcggcgatcagaggcggggttgaggaacgtcagccttcgcttagcttgcgcagcacaacgatcacctcgaggggggcgagcagagaaggccgcacagagatcaggtgcttcgcaatctcgtctgcgctaaatgtctctgggtcctcggtactccttgccgcaaaaccgacctcgatgtcgacttcgccgagccaggcgccccggccgcccaggtcgatcgactcgacctcgacgccctcgccgaccgagacgttgagccattggcgctgggggttcgaggcgaggaggacaccctgaggaacggaaggatcgcacctgtgcgagaaccggatgagggctggtcagctgaggacggtagccgaggccgcgagatgagacgagcgaggggtaaccacctacttgacgccgacgtagtgcgaccgtttgacgcggacacactggacgccctcgaggtcagccgggttcgctatgaggcagttgtaaaaggccgtcgtctcggtgcccttctcgatccggaagctggagtaggggcgcagggacggtcgcctgtcagcgaaggtcgggcgcagggggtgacgtcgagcaggagatggttgcggtggaaggagggggaggcaggggacgtacacgcctcggacgccgaccccctttggccgatgtgcgctcttctcgtcgccgtacgcgctaggcggcgccggactccgtccactctgaggctgcgaaggccgcgagtagttgcctcctgctggaggctcgggctgctgctgctgctgctgagggcgaggcggcgtcggcggcggcgggacgcgcgagtaggcgcctgctccgccagcgctagtggcggccggtcgctgtccgatggggttcccataggcgtcggtctggggcgcgccggctgctgaaggtgcagacgagcggaagaaggaggccatgtcgtgcgggagatgaaggtgggggtcaaggggtaagagcagcaggttgcctgcgcggaactaggcgactcgttcgtctctagagaccgtcaccatctctcctgactatcgcagcccggagctgtaacaagcaagcagccatggtccgtcgctttgccctgccatcacccgccagccttgaggctgactcccctgacaacctccgcttcactgccgccgccatgacgcgctcctctcatgtcgtcgcgtccccccctccagccgcccaagaaaggcgactcgcagatgacgctcgccttcctgtttgacacgacccggatcctgctctcgatgccgtgtacgtccatcggcagcgctcatcctgaggcatcccgttggccagcttgactgacaccttctgccgccataaccccatgcctcgcgcgcccgcagccgccacgcccgtgtcctcgctccctctcctcctcttcccgcccctccagctcgcagccgactcgctcgcccacccgccaacagacgaggacagctttcgtgtctgccgccgtgtcgagacggccaaggaggggagctttgcgtttagcccgctgcgggacggcgaagggaccgtgtacaaggcggtcgggggcgacgtcaagcaagtcggcttccctgtgaggctggactaccggaggaagaggaggagctgacgccatgccttgcctctcttccagcgagctgctgttcatcgttcgtccccttactctcgcttcgcgcggtcgcggcccaacccccgtctgaccgcctgcgcacttcctcctcccccctcgtctccagcaattcaagtcggcctctggcggctgggcgcctatcagagtgacaattccctcgatcgaggaccagccgtcgttcgctgacgaggaggcggccggcgtcatggacaacgacgaggaagacgaggaggagttcgacgaggtcaaggcagaggacgacgacgacgaggccgtgccgcagaagggcaaggggcgggccgaggtgatcgagcttgactaggccgtgcaccaattcgagagggcgagcgagagagaacgtgcacatcgtaagagggtcgtgaggagagaaggacagcagacagcgtggtagtacaagagggcgagagagagagacaagagtccgacgagaaggcggttgcgacgctcagaccgagatggcgctcgccttgcgcttgacgtcgtcgaggatcttgcggagaaagagcttgccccgggtgtcgcccttggaccgctcggggactggcggcggcgcgaagcaggtgatggtcagctgggggcgcgacatcagagcaaaaaggccggccggagggacgcacgccactctccgttgcatacgacgaggacacgcatgcgctcgtggtagtcgagctgctggaggagtttgggcgtgaggaggaagaactggccggcctccttgtgacaggtgaccttgaccatctggttgtggacggcccgctcggcccgggggtccatgccctggttgattctggaggggtgcaaggatattcagcagcagattcgggcgagaagcggtcgagggacacgtactcgtcgacgagcgagaagggtgcgttggagagctcgatcatgctcatcaggtacatgatggttgagagcgagcgttcctgcagcagcgggtgggggttcagcagagagaaacacagcgccagagggaaaggacgcactccgccagactggtgcgtcgacgtcagcaggtgcagcttgtcctcggcccggaacgagaccataatctcgatcgcccattgaacatagtcctcgtgctcgcggatccggatctcgccccggtcgtcgaggcctgcgagaagaaggatgtgtcaacgctaacccccggtcagtcgagccaaaacaaagcaacgcactgtccatcgcggccgaaaacttcttgttgaagttgttgacgagtttgcggagctctggcagccacttgttctgtggatagcggcaagggtgtcagcaacagcgcgacccggcagcaagcgagcgcaacgacggaccttggtctcgcggatcttcttctcgagcttcctctcggcgtgctcgagatcggctacatcatccgtcaggcggcggatctgtcgcggcgaaatggtcagcggcacgctaatcgactgcaacccagccaggaggaacgcacctcgttctggaccttgtcgtacttggcaatgacggtggggtcggcgccgccgattgactcgagctcggcttgcttttcggcccggctctcttcaagcgcatcgagcccctcctcctcggcgttgtcgttctgtgaaggcgaacggatggggaatcagtcggcggcgcgggagagccgcctgcactcacgtaggcaagcaggcacgcaccatgcggcgctgctggaaggcctcgcgggcctcctcgtccagttcgtcgagctgcgactgggccttgtcgagcgccttggccgtcttctccttttgcttgacgaacttggcggagactgaggcggggcggtcgggcaggctcagtcgtcaagaagggcacccgggagagcggccgggcaacgcaccttcctcaaagtacctgacggcctcgtcggcggcatgggcgccctcctgcttcatgtcgtcgagcgcagacaggttggcctggacctgcatgacctcgaggttgcagtcggtaagcgcctgattgaccttggacagctggaggcacgagctctgcgaggcgagggcgtatggggtcaggtgcaagctcgcttgatcgtcgaggcggggaccgcgggcgactaacggcgtagcgcaggtccatcttgacctttgcctggatctcgagccggagctcgcgtacgagctgctcgcggcgctcctcgtcggacggttggttccggagccgctcgtaacgcgacttggcctcgtctgcgggtggacaacactgaatcagccagtggctcgttcggctcgagcgcaggcgacgccaagacggggcctgactgaggttctgctcgagctgagcgttgcgcttctggtgctccttgatgaccttcattcgctgcaggacctcattctatggtaagattgcgcacgagtcagcgagtggagaaggaaaaggcctgtgaggacgaggtcgggacggacgtgttcgtcggcgcatctgttcttctcggtctgcagagcatgctcgtgcttctcgagctcgcggattgaccgctgaaagtcgtcaatctcctcggcgagcgtctggatctgggcctgaattttgtcaatctgcgactggtcgaccgaggtcgcaaagctcttcgccgcagtgacgtcctttgtcgtgctcgacttggtctgcgcgccgtaccgcgaggtcgaggtcgagaaggtcgtgtcgccggcgacatagttggcgagcgccgacgcattgacgcgctcccagtcgaggccgccacggccgatcgggttgagcgagatggcctgcaggcgaacaaagccgtgtcagtccgcaggagggcagcacggttgctgtcgcaagggagggcacgcaccgtccggtgaaggccggcatgaacctcgaggtaggtcatgacgggatccggagcagagacaaagtcgatggcgaagccctggaaaccgaggtggtgaagctcgtcccggctgatcggcgtgttttcgcgcggctttcctggctcgatgcaggtgacgttcagccgtgcaagctgcttgccgagcgggttctgctcgctgtcggtgaaggccgagatgagctggtagtcctcctggcactggcatataatggtctgagacgggggcaggcagcagcagggtcagcgcaagcatcggccgccgatcagaaccacaacttacccggaggtgcgtctggttcattgaggcctcgaccgcgttggcaaactgcttgtcggggacgctgaccgagagacacggcggctcaaagaccttcatcttgaagtaggaccgctcaccccgcgcgactcgctcggcgtcggaccggagaaagaggacgagctcgtagatgtgctccgacttgggccacgtccggaggttctcgagccgggcgtgaccgagctgcgagaggttgttaatgctggcaacgggccgtttcagcgacgctcttcgtgcgaacggggttaggacggcaagagagaaggctcactgggtctggagctgcttgatgcgcgcacccttctcgtgaacctgccggtcgagcggctgacgggcctctgtgacctctatcgcaaggcgatcgtcaatctgccggccagcgttccgcgtctcggcctgggaagaaacagcgcagtggtcagcgcgaggaacgggccgggggcaagactggtgagacgaggatggcctaccacgacctgctcgagatcgcccagcggctcgggctcgacccgagcggcgacctgctcctgtgccgtgtggacggcggccttggcgtcctggagcttgattttccgcgcggccgcctgcgacttcatgttggtgatgccggccatgcacgactcgacccggtcgagattgccctcgatattctttttgttggtcttcatgttgctctctagcttcgacatggccgcctgcgccttcttcttgcgcgacgtcgcctcctggccggccagcttgaactccctgtggcgcgccgagcaagctaggtcagtcgaggctactagcggaagagacgtcgccagacgcactcctggagcgcctcgaagggctcgaccgcggcctgggcggccttgacgtcattgtgggcggccttgcgctcagtccgcagctggttgtagccctcgcgggccttggtgtaggccgcaaaggggatgacgtggtcgagataggtgatctggcgacaagtagaatgtcagcgaccttcccaaaatcacgcaatggacgcaaggcgcagagactgacctcctcgacgagcttctcgcggtccttagcgttccggacctcgccctcgagccgctgggctgcccgctgcttgctgccgagctcgtccctcttccgctggaggttctcgttgagttccttagactttccgccggcctccatcaggtctctatgccaggccgtcatctgcggcgggcctgccgccttctgcgtctgggcgagcagctcttgcggcgtcatacacgcaaactcggagaccttatcctgcggcaggaacgagcagaggttgccgacctggatattgagcgcctcaaccgccgcccggacattcttcatcgtctcgtgcttgcctgcgtcgaggtggcatgcggtcagcggctgttgttggacggcgagggccctcgagccggacgcaccgttcatctccatcttggacttgttgctgtccttgccgagcgtccgcttgatgatgaggttgcgctcgccggcaacacccttgagctcgagctcgacgtaggcctcctttgcgccgtacttgaggaactggctcaagtcgtcggcccggccgaggatctgtgatgagcgggtcgcatcagtcaattcgttcgctgagggtcctgctggctgacagggcgcgccttgggcgaccagccgagtccaatggcaatcgcattgacgatggtcgacttgcccgagccgttgggaccctgagagccagacgcggatgggtagtgagtgtcagccgcaggcaggtcgtcgcgaccgccggcccgagccgctacggacgatgatcatattgagataggggcccgggaagaactcggcaaagtcgtacgtcagaaagctcttgagctggacacggacgatggcgccgggcagatagctgcgagcaacgaagggaagggggaccgaccgctccggaggtcagcgaaggcacccgatgggatggagggggtcaagagcggacgacgcacccgtcagcgtcgcgcatcgcgagccgctcacgagcctctgcgctcaggtcggccatcagaccatcgccatcatcgatcgacgcatccgggtcggcgtccgagtcgtcctctgcgccggcagcctcgcgctggacgacgccgtcgaggtcgagctcgaccggctcctccttcttcggccctttcgccaacggccctgcctcgtcgtcgtatggctgctcatatccgttgagctgcgaggccgaccgatcgcgcacccggccgttcgacgccggcgccggcgacggctggatcgtgctcaacgggtcgcgggcaaaggtcgcggtcaaggtcgacggcaccgccgccgcccggctggcgtcgactttctcggccttgacgttcagtcgccggcgtttgctcgagcctgcctcgtcttccggggacgacatccgggaggggagaggcagcgtaatgtggatgagagtgagagcgagcgacgagctgaagacgcgaccgacctccctctcgctcgcggcgcgtctccgcgcgcgcaggcggcgggcgtaaatgagagagggcagcgcggacgcaagacggtttctcctgctcagtcgagtcttggccggccttggtaggacagggccatggatgcagggacgtgagaaggaagtgtatgattacaagtcttgggcgacaaagggcgggcgtgctgagggtcgagaccgggctgcgccctgctccctcacagcctcctccttcagagcctcctcttccacgcgtcgaggatcgagagaacaaaggcgctgaccgagtggccggctgcgtgcaggcgagagacggtggcctggtcagcctgcgggaaggaaagggtaggcagggccgagggacgcaccgtcgcacgacttccaggtgccgtcgtggatgcaccggacctgacgtagtcgcacgacagccccggtcaatgacaaagtcaggctaaacagaggcagccagcagggagacgtaccttgtgctccttgccgagcaaaatcgtcgcgctcttctcgattcccatctcctgcgtccgcctgacgctctctcgcaagcgccgctgcccttcaccttcctccgcgcagcgcctgatctccccggaccactcgaatccgacctgggccgcacactcctcggccaggccggtcgtcccgatccgtgcgggctgaccgtcctggcaaacgacaaacggccaccagtcgctctggttaaggtacgcctggacgcacagctgctggacgttgccgtcgcactcgagctcgccatgcttgcatgtgatgccacctggcgcatcgttgtcgagcatgccgatgtagacgagctcgagcgcgaccttgcccttgactcgctcgtcggcgagcgtctggtcgatcagggcctccacgaggaaggcgtccgggcagcgagacatgacgccgagcgtgagctcgacctggtgcgtgctgctcgtcgccggcaggagcggggcttgaggagggaatgcgacggccgacgacacgatggcagcggcggctaggccgacggcggctgatgcgatgttcgcgaggcgcatgctggttgcaatgtgtcggatgacgttgatcgatggtgagggcggtgagggttgaggaggaggaacgaggtgaggtgatcgctctgaccggagccgacggtcaagcgtccgctgagctgcccagggcactcgtacactctccccgcgccagagacgcaagcttgggcaaagtggcatgaagacctctgattccatcaaacctctcgcagcgttacaacattctgcagtccgccttcaaccctctcagcacgcgcgcagtcgacatgacgagctcgaccgcgaccttcaaaggctctcgagcttggccttcatctctgcgaagacggcgtcgagctcgtcggcgctctgtcgtgtgaggagtcggcgggcaagtcaggatcagcgcgcggctcacgcaggagcgggaatagagggcggctgagcgaggcagtgagggagagcgagcaggatgagagaagggaagacgaacgggcgaggtcgtcggccatttgataccgctgtgaggtcggaggggtcggagcagaaggcgcgatgagggagggtcagccggggcttcaagatgaagagagggccgcgaccgggggattcccgctgaaagtaagcagagggaagggggacggacaggccggcatcgtcgttggccgacggcttggggatcacctgccgagagagaaggagagcggacgtcagtcatccactcgcagcctcgcgcgagaccgacccctgttccctgagcgcgcttgtacggccgagggacgcacgtgaaagtggacatggtcgacgacctggtgggcgttccggccgttgttattgaggacgttgaagtcgtcagcgccggttgcgagcgcaagcttcttgacgatggggaggatgtcggcgaggtgctcgtcgggcagctcgtggaccttggccgcgtggtacttggggatgacgaggcagtggcctgaaacaaggggacacagggagtcagccgtcgaggatgtagagaaaaagacgcagcagctggcgcaccctttgacagcggtccaacgtcgaggaaggcaaacgagtgggccgtctcggcgagcttgcgcgaggggatctcgccgcggatgatcttgcagaagatgcacgaggccgaaagcgaagtagctgcagacatggttctgcggtgagcgagcgagcaagtcagcctcccgcagctgtgcccgcatacagccgtctcgccggtcgacgcacgagagaggggagatggtgagcggtggcagggaggagggcagccaggggtcgtgacggaagacgccccgagtcggacctagggttatgtcggaggctttcgcgagaacctgccgaggtcgcctgcgcgccgccctctctccgcctcgaccagctcgtcctcctgctccctcgacgactgcctcatccgactcttctccagccatggcctcccctcctccctcgcctcaacagcagcagcagcagcagatcgagagcatgccttcagaggcgcccgtcgcctcccaggccggaccttcgaccccgacgctcgctcctccgcaggctgactcgcagccgcccatcaagaacctcatcctcgacgccgccccgctcctgaccctcttcccgctccgcggcctcgcctcgcgctacctgatcgcgcctcaggtgctcgccgagatccgtgaccggcgggcgagggagcactttgaccggctgggcctgatggagggcgtcgaggtcgtcgtcagggaaccggatgccgtcagcctcgccaagggtccgtcctcgctctcgctccgtcagcgcggggtgctcaaccatcgaaactgacactccctgtgcgccgacccttagtgacggctttcgccaagcagacgggcgactatgccgtcctctcgcacaccgacatgtgcgtcctcgctctaacgtacgccgtcgaggtcgaggagaacggtcactggcgcgtcaaggacgacctccacaaggtgcattgcgagatggcctcgtgtgttcgttgtcttacacagacacaaagacggaggctcatccctactactcttatctcagcctccgtctggcaagcctccgccgcccaaggacgcggccgtcagcgcagccgcggcggacctgatcggcggctcgtccgacccgtcgttctcatcccttccgccagcagtcgacggcgacgcttcctcgtcgacggcagctgaaccggccccgacgccggcttttgcaccggctcagaagtctggtccggcgttcgcaccagcctcggcgtcgctgctcgcggctggctcatcctggggtgctaagccgccgccgccgtcgcctcgtgcgccgtcgccgtcagtagctgcagagctgaaacttggtgctgaaggggaggaggaggatgagcagctcgcgcgggaggtcgagaaggtgtcgctggccgtcgagtcggaaaagccggcctcgtcagcagccgacgacgagtcggaggcgccgaacagcgaggccgggccgtcatcgacggctggcggctaccctgcttccttcgcgcccgaagacccgacggacgagcttgacgactcgcactcggaagacgacgaggagaccggcggcgaatggatcacgccggcgaacgttaacaagtttaaggcgcgcgacctcggcctcgccctgcccgagtcgtcctcggcgaggggcaacaacctccagccgaagaagccgcgggcggtgatgaagagcgcgtgcatgacgtcggactttgccgtgcagaacgtcctgctccagatgggcctcaacctcgtcggcggcgagggccggcggatccggagcgtccggagctgggtcctccgctgccacgcctgcttcaagtgcgtaactatgcgagtgccagcttcgccgctcagccagctgatccgctttgcgtcttccctaggctctgcaaagacccgtcgaagaagttctgcccgtcgtgtggctcgccgacgctgctccgcgtgtctgtgacgacggttgcgccctcggacccgacgtcgacgacggaaaagacgacggtcgtccatctcaagaagaactaccaccactcgacccgcggcacgcgcttttcgatcccggcgcccatcaccgggagcgcaaaaggccagaagcacggcggctcgggcctgatcctgcgcgaggaccaagccgagttccagcggggcgtcaagcgcgagcagggccggcggatgaaggacgacaagcggcttgccaaggcggctgcgctcagctcggccgctggtcccggcgcgctcgcgagcaactggatggacccggactggatgcccgagatgcacgccgtcggcatgagcggcaagggtcggcgccagcagggttcgttcctgcccgagattggcaccggccggcgcaaccccaataaggtcggcaagaagaagaagtgagatgcatgtcgcatggccaacttgcagcagagacgatgcgcggttttgcggcggaaggtcgtcatcaaagaaagggtggaagggggtggcacaaaggggggggggtcgctgctgcgcggacggcccgaggcgatccctttcagccctcagccctcagccttcgaccttcgctctctcctgcccgaccaccaccaccaccagctccccttctccagcagacatcccttcttacaccgcctccagacttcctcgtcagctctctccgaaacgatggcgaccatgatccaccgcagccgagaggacgccccggccccggcgcagcagagcacaaaggccgcgccgccggcggacaaggacaaagccgccgctgccgcccacacccggtcgagctcgtcccagacgccgcgcaaggtccgcttcaatgtcggctcgcgctaccaggttctcgacgtcattggagagggcgcgtacggcgttgtgtgagtctgcctgacgttggcgagggaggtcgggtcgacaggaggaggagggggcgcgccgagctagcagccgcttacctgtcgacatctctctctcccagcgtgagcgcgatccaccgcagctcgggcgcaaaggtggccatcaagaagattgcgccgttcgagcactcgatgttctgcctgcgaaccctgcgcgagctcaagctgctcaagtactttgcagagtgcggcgtgcgtcccccctctctcgctcgttctgcccgccgccgcgcgcgcgcgcgcccccgtcgcggcgccgagagcccctttgatcgtcgtcgtctgctgcggacaaaaggcctgatctcgccttgaccgcccttctcttcctccttcttgcaggtctcggaaaacgtgagtccaggctgagctcagcgacatcttcacggcgctgatgctgcatcctctgcgctcggttccagatcatcagcgtcatcgacatcatcaagccgccgtcgctcgaggcgttcaaggaggtctaccgtgcgtgccgcccgtccttgacctgtgctggccggccgctcgagctgaccctcatcgatgccgccttgagcagtcgtccaggagctcatggagaccgacatgcaccgtgtcatccgcacccaggacctcagcgacgaccacgctcaggtgcgtctgatcagcctcttcaccggctttgaaggagcgctggtggctgattgcgcccctctcttccgcagtactttgtctaccagaccctccgcgccctcaaggcgctgcactcggccgacgtcatccaccgcgacctcaagccgtccaacctcctcctcaacgccaactgcgacctcaaggtgcgtgcgcacgctctgccgtgctggctcccttggcgcttgctaacctccaagggcacgagcaggtctgcgactttggtctcgcccggagcgtcaagacggcagagccgaacggcaccgagacgggctttatgacggtacgcgagcgcttcgccgataacttctcttccagaatcgcctgtctgactcgcgctcgagcttctcgtcgagcaggagtacgtcgccacgcgctggtaccgcgcaccggagatcatgctcaccttcaagcagtacacgaaggtgcgcgcccacacctgtcgccaaccaagccacttgagtcggctgaccatgctttcgtgtgcccaggcgattgacgtctggtcggtcggctgcatcctcgccgagatgctctcgggcaagccgctcttccccggccgcgactaccaccaccagctcacgctcatcctcgatgtcctcggcacgccgacgctcgacgagttctacgccatcaactcgcgccgctcgcgcgactacattcgtgcgctcccgttccgcaaaaagaagccgttcgcgcagctcttcccgaacgcctcggctcaggcttgcgatttcctccagcggaccctcagctgtacgtcgctcgtgacagcatctcgcggctcgtcatgctgacgtcgctcgcctcgcctgcagtcgacccaaagacgcgcttgacggtcgaggaggccctcgagcacccttacctcgaggcctaccacgacccggacgacgagcccgtcgccccgccgctcgacgcggacttcttcgactttgaccgtgcgtgttcgaaagcgtctctgatgaatgttaccgtcgctgccattgacgccgacctcggcttctcccgaccacagtccagaaggacgacatctcgcgcgaagcgctcaaggagctgctcttcgacgagatcacgtcgttcaagtcgatcgactgaggggcatcgacgccccctggcaccatcccctcgcacgcaaacccttctcaacgatcacgacccgtttaacgaccccgcccttcgcccctggcccctggcccctgctgtctcccttgcttgagccgacttcaaaaggctccctcataactttttctctcttcttccgttacccttggtccgtacccgcttgctccggttcgcactctcccctcgcctcgttcgctccgcacctcacctcatccccatccacagaggcggcctcaaatggctttctcgcaccgactttggccacgctcagcgagacatgaatgattatggtttgaaatgcagaggtaggtggagaatgcagcggatacagtgttgtcttctttgcgaggccgttccggcccgagcggtacaagcggaagaggagagattcggtggtaagtgggacgaaagattgttcgaggtcgaggtctatcgacgtttctaaggcagcggcaagagagagacagggccgacaggcccccgttcacttcttcttgccaaaggcgttcttggccttctcggggaagatgtcgtcggcgaccgtgtcgtaacgggccatgcccttctcgttgtcctcggcgccgggccgcttggcaatcttgtcggggttcatcttgcgccgggcaaacttccagagctcggtgatgacaaagtaggcaatgaggcagccgccgacaattcccctggagaggcgagaaggtcaaagcggaggtcagctcggttcgctcgtgtgcaggcgagcccatgctcggactgaccactcgtatccgatgccgacgagctggaagacgtagtccgagatgaccctgaagagagagcaaggcaagggtcagaagccaagtcggccgggggcagaagcggcacgtacgggatgtagagaatcgggaacgtcgtcagggcgcagatgccggccgaccagagcaggaccttgttgtcgagtaggttcatctggaagatgctgtactcggcgctcttgcactgcggacgaggaacgggcggaggtcagcgacgagacgagcaacgtcgtttcagaagaagagacggacctcgagggcgtggagcatgagcaggagcatgacggtgctgcgagaggcgagggcgtgactaaggttagtaaggttgcctcgcgaccagagcgagtgaggacgtacgcgtagcaggtggcgcggccgtggtaaatgttcttgcactgcgaggcgtcgtagccgacgtcgttgcaattgaggccctggacgccgatgccgccgtttaggtcgctcgcccagacggggatgacaaacgagatgacgccgagcgagccgatcaggatgccgtagaagaacaggtccatccaccaccagcgggtgaagatggtccggtaggcctcgggcgacttaaacatggcgtcccaggcggttggctcgaggccgagcgcgagcgcaggcgggccagcggcgatcgtgttgatgaaaagagcggcgacgggcgagagcgggtaactgcggcagagagcgggggcgtctgtcagcgtcgattcagcgagatgctggccagaaacaatgagacgcacacggcgtttccggtcgagtcctggaaagcgaggccaatcactgaaaaggtgggcaaagggcgccgtcagcgaggcggcggtcgagatgggcagcttgggcacggggacgtacggaggacgaggacttccgcaatgttgcccgagaggaggaaaagcaggaacttggacaggttgagcaggacaccgcgacccttcttgatggcacgggtgatggtgccgaactggtcgtcggcgaggacgacctcggcggcacccttggcgacatcggatccgttgaggcccatcgcaaagccaatgtcggcacgcttgagcgcagggcagtcgttgactgcgagagggcaagcaagacggggggggtcagtcttggcagagaagggaagacattagagagccggcgcacctccgtcgccggtcatgatggtcgtgcactgcatgccgtagcgccgccggcggtggatggcctcaaccatgcggaccttggtctcgggcgcgcaacgggcgacgacgagcgggagctcgggcagggcgtcaatttccgcctcgctcaaagcgtcgaactgctggccggtcatgacggccgaggcgggcgagttggcgtcgatgatgccgacggcgcgtgagatggcggcggcggtcgcagggtggtcaccagtgagcatgcgaggggtgatgccggccttgtgacactcgaggacggccgagcgcgaagcaggacggggcgggtcgtagatgccgacgaggccgacaaatttgaagcccacctcgaggtcgtcgcgagccatagccttgatctcggcctcgtcgccgatcggggcgagcttggccgacagggcgaggacacggagaccctcggcagcgagcttgtccatgcgtgagatgatgtgggcgcggttcttgtcggtgagctcgacctggttctccgggttgaggccaatgtgcgtgcaccggtcaaggatccgctcgacggcgcccttcatgaagatgagcatgtcgtcggtcgactcctgctccgagacgtacttccaggcggtgctcatgcgcttgacggtgctgagaacgagaaagaagccagtcggtcagcggcaggcgacagcggaaagcaaggggggcgccggaacgcacgagtcgaaggggtgctcgacaatcttggcgtagtggccggccagggcgaccttggcgggcttaacggcggcagtgtcgcttgtgcgggtcgtgatgggcgagagggcgtcgcccttggtctggacggcatgcgacttcttggtgtgcgtcaggtggggttggccgtgaccgagcttgtgggcaaagacctggagggcaatctcggtcgcgtcgccgttggcctcccacgtgttgtcctccgacttgtggatcgtcgccgtgttgcagagcgaggcgcagaggacgaggttcttgaggccctcctccatctcggaggggcgaatgacgtcctcggcgtccatgtcgtcgtcagagtcgtccgaactggtgctgtcctcgtcagggcggagcgactgtcgggcggccgagcggacgataccgcgagggtagaacgggtcggaacccgactcggccgtgtaggcctggccggtgacggtgtcgatgcgagcccagtcctggtcgtcgggccgggcgccgtcggccgggatccacgccttcttgacaaccattttgccgacggtgatcgtgccggtcttgtcagagcaaatgtcggtgacggcgccgagagcctcgacggcgtccatccggcggacgagggcgttacgctgggcaagctcgcgcgtcgcgttggcgagcgtgagggacacgacggcgatgagggaggcgggcagaattgagacggcggtcgcgacggcgtaggtcgcgatcgagaaggggacgtcggtgaaagcggtcgaggcgacgacgatgaaggcgaggagaagcgcgaaaccgaggaggatgtaggcgatcgtgttgagcttgatctgaagcggcgtcgtgccagccgttcccatgacgaccttgatcttgtaccacttggcggcccagcccttgtggttggtcgtctccttgcgctccatcgcgtcggcaatctttccgagctcggtccgcatgcccgtgttgacgacgaggcagcggccgcggcctttagtgacctgcgagcccgaaaagaccatgttcttgcgatcgccgacagggcagtcgggctcgtcgagaactcggtcgtgtttcttgacgggcagcgactcgccggtgagtagggcttcgtccgtctcgagcgacgagagctcgtcgggcctgcaatcggaagaggcgtcagcaccagctcgcaatccaagggcaagatgtgacgtatggacacacaagcagcgagcgtcagcggggaccacgtctccgttcttgacgaggattatgtctccactgcggagaaggagctcaagccagttcagcgacggctacccgcagcacgcgggagcaacaggtacgactcacggaacgacctcctcgacggcgagcgtcttggtgttgccgtcacgaacgactacggccgtcggcgagccgaccgaagcgagagcggcgaccgtcttctcggccttccactcctgcgtgaagccaaccgagacgttgaggatgacgagggcgaggatgacggcgccggcgatccagtcctgcgtgccgaacgagactgccatcgaggcaatcaggacgatcgtcattgcattggcgacctggcgtccgagcagcttccagggctgaggaagaacgagagaggagagggagatgcgtcagcggcaccggatgggaatcgtttggagagcagcgccaagacacgagtcgagccccgcaaacgatgggcacgctgcgcgcgccgagccacgcaaggcaagtaggaaagaagcggactgaccgacggcttctccggcggcttcagctggtttggcccatacttgctagaggagcgggcaacagggcagcggcaaaaacggcgtcagcggaacggaagtgttggggcgtgggtccggcgcactcacttctggagctcctgggcctgcttgtccgagaagcccttgactgggtcggagccgagggccttgacgaggtcctcggtcgatacggtgtgaggcgcggccggaaggggtggcgcgggagggagctcctcgaccttcttagccatacgagcgggtttgctagaggtctgggtgggtgatagggcgacgggaggaggagggagaggtgacggtcggagggagggcagccggcgaggagggctgaggcggagtgaggagacttgaggtcggcgagtcggtccggtcgggtgatggttagaggagaagacgggtcgtccttcgctgacctatcatttcgcctttgaagggaggagcagctccgttccggcacagacgacggcgtggcgacttggcattcggggcgagcgaccggcccacctccttctgcgccgacgtcagactcgatcgctttcgggcggctcccgtcggttcgtttgctcccctccttccaggccaggacgatgctgccgcctcagacagcggtaaggacgacggcagctgaagcagatcgtcttcgatgaagctctcgaggccgtgtctgtgagctggcagcttcatgaagtacaagggagggcgagctgcaggcagccgctgcggccggcaaccggcagcccagagacggattttattaaagtacgacttggcaaggggctgtcgttgcctgctattgatgatcgccacgaaaccgcagccgaaaatcccgaattgaagccagagatagtaaagacgaagccgatgagcagcaaagcacctccgagagagagaagactgtttgcagaaggaagagcgaagggaagcttcggaggcgcagccagtacgacctctcgttgtcctatttccggtcccggaggtctctccacctctaagctggccgagtagagccaagaagtagtggtcgatccgccatgccggcttctctccccagcagaacagagggcggccttagccgggccgcatcgactcggccgagtgggcgagcgtacgtaagtggccgttttgacgagcaggtatcgcgcagcaaaggacttctcggtgcgcaagcagcattcgtattctacgagctcgatccgggatgagatcaagaggggagcttgggcgcgagagctgcagagaaagggcacaagtgccgaggctcacaggctggtaaatggcctctgcgacggcttgcctttcgcgggcggcaagtctatgcgcttgaccgggcagccgtcggcgtgaaggggtgcggccgcgagatgtacgacaagccgagcgcacgtccgccgtctgtcgttggttagagaaagcaacagattggatcagtcaccagagccgcagcacagcaggtgagcaagcagcgcaaggcggacgcacagacgtagccggtgaacttggcgatggccgacgtcgcctgttcgacagcgacaaactcgcagacgccaacgccgcgcgaccggccgttgggctcgagcaggacctcggccgccacgacctcgcccgtcgtctcgaacagctcgaccaggtcctcgttcgaggtcgaccagggcagctgcggaagattcttgttcgtcagtctctcctttgaagactgtcggcgcagagcaaggagacgtacgttggtgacgagaatctgcgtgctctcggggttggcctgctggtatccacctgcaccgccgccaaagccgcccgctgccggtcctccgaaaccgcccggagccgaccctccaaacccgctctggccgccatgaggcgagcctccgaagccgggtccgccgccgtaaggtgtcgcgccgtagcctcctcctcctcggaaggggggcgggcctcccatgtgtccgccaccggggtagccgccgcccatgtgtccgcctcccatgtggcccatgtgcccgccgccgcccatgccgccccggaagccgcctcggaagccgcccggcccagcgaaacggtcctcgcgaacctcgattcgccggtcgccccacatgaagccgttgaactgatggatcgcgttggcggcatctaccggcgactcgaagatgacgatgccgctcccctttggccgcccgtcaggcagcgtctggatgtctgcccggatgatgctccctgccggacggaagaggtccttcagatcctgccagccgacctggtacggcagctgcaaacgacggcggaggggttcagcggtcgaccgcaggtcatcggaacgtcgagaggcactgacgttgccaatgtagagcttgttgccgcccatgccgcctccaccaccgaagcccccgccgcccatcattgcccgcgcgcctaccgacggaggagcgccaaacttggctgcctgctcgcggtcctgatagatgagagcgtacgagaagagcacgaatgtgagcagcggcagagcgaggctgcagacggcgcgcgtaacggcgatacgaacctcgcggatgaagacgggccggccgaggagctgcttgtcggagaactcgttgatcgcccgttgggcgtcctcgcgtgaagcaaactcgatgatactggacgacggccgaccacctgtgagcacctatggcggggaccaagagtgagggattgacgcacccgcatcccttcgacaggccttgaggcgtcagaagaatctcggtgaagacgacgccgagaccggctgcgagaaagcaaggtgcgagcagccgacgtcagcccttcgagacgggcgacgacaacttgagcgctcggtaagccccctttgcccttcttctcttgccagccccagcccaggcggcatagggcgaacgaacgcgcacgagacgtagcaagcaaggggcctctcgaccggtaaggacttgagtgccaacccgcaagcgactgatcgagcggcggacgcaaggcccgttcttgaccccagccagcgccctccagctgaagtcggttggctaccctgcaagtgctgcagactggccggtgtggaacggcctcgacagcaagatcatggcttgggaagagcgccaacccatcgccctgcaagaagagatcgactgagagcccaaagccgcccacgcaccatccgtcatgaactgctcgaggtccttgtaccggacgtcgtagctcagattgccgacatacacccggttttccttgatcgagtgcttggcgtgctcggccgcctcatcgatgggcgcgttgaaggccgcaccgcccggccgagggttgaacgtgccagggatgacggctggcggagcagaggggggcatcgcagaggggtcctgccggcagcacggcgcaaggggaggcaagacgaatgttagcttctcgcgcacgggtcgggtcaacacgctccagacggccaaggcagcccgagaacgcacctggtagcggtagccgtcgaattgacgaggaggcgagcgggagcgagcggtctgcgagggtcgctgcggagatgggcgcgccgggctcgtagtcagctccagcgcaatcttgagtcgccggtgacggctcgacgccggctgcacgtcgcgagattggggcagcacctgctagatctgaccacagcagagcaggagctaacaggcgagacggcaaggggagttgtggatgggagagaaaagacgaggccgtcgcagtcccgagcttccgtcggcagctgtcgctcgccgaccggcctgcccgcatcgaccggcagactccgacgacgcactcgcagcctcgcgcaggcagcaagctaccagcagcaagggcggcgcatgcgcggtccctctcgcaggctgcgggtgctcgagctcctaccgccgcccaacgcttgcgcgccaacgctgctgaacgctcaagtcgaaaccctcgctcgctcgccttctgcccggagacaaaaaactcacgtcgtagtcacgtcccgcccggtatgaatcctcgatccttgagccctctgcgccaaacgtccgccgcgggctccggctcctgctccggtcgcgcttgggctcttcgtcggcgacagcagccggctcggggtcgtacagcgcgacggcctctgccggagccgcctcctccgtctgctggggcatagaaacgtcctgcgccgtctccgagacgggtgccgcctcctgctcctgcttgaccggctcgaccggcggctgctcctgaaccgacgctggctcctcgggctgctgctgctgctgctcctcctgcttgaccggcgcggcggcctgctgctcgacgggcgcggcctcagcctccactagctgctcagcctgcgccggcggcgcctggtgctcctgctgctcctgagcgatctgctggggctgctcgtccatcttgaatagggtttttggcgagaagaaaggggtgttggtcggggcgtcgagctgatgagcatggccggatcgtgccttgtcggccggcggaggtgcaaactcgcagatgcgagtcgaggcggtcaggcgcatctcgggagaggccctggctccgatccttcgccccctacgaccacccttgaggcttctgaagaacgagagaagcagagagaagcagagagctgcacgttgacctttgtcagctgaagcctgcgtccggcgagggtcgcccagcgaggtcggctgtcgtctgctgctgcgcacggcgggtgggctgaatcgaacccctcgcagccctcgatctcccaaacgaccaccctgtgccagccgcctctcgcctactttccatcttcaaatccagctcgctctcgattaagatgaacgccagcatgtctctccgtgcctggcgagcgacgcccgccgccgcgttcctccgctctcggccgacctcgtcgctcggcgccagcctccgccgaggagctgcctcgcgtccggcaacgtcggcgccgctccagaggagacctttgccggtggacctgagcctgcaggcgacggcgcaagcggaccggggatcactgctgatcgtcggtggtctcgtcctgggtttcggagcatacgctctctccgatggtgcgtcaccctgctggtcgccgctcggtctgcttcttaagggagttcggagctgacaacggtcctgaccgccttgattactgatagacagaaacctgagctcaggctcgatcttctacaaaccaatccggctcgattcggccgttcctgctgctatggctaaaccgaacgagcgcggtacgtccggctctgttaatggcccacctgagtcgcacttgcgacacgagtactcaatgtaagctgacgctccttccctcatctatctccttcagttgacccgtcgacggcactggcgttcccactcacgctagcacccaagtcactctcgtcctcactcgcgctcgtcggcctcggtgtccggaccgtctcgttcctgcgcgtcaaagtctatagcgcaggcttctatgtgcccgagggcaaggacggccggtgggggactgacgggatgggcgaggaggctgctatggcgagcttcctgaaggatggggcgtcctgcgcgatgcgcattggtgcgttgaagtctgacggcgagccaccttgtgcatcggcgctgacccacttccttggcgccttcatcccttcagttccagcgcgcaacaccgactttgctcacctgcgtgatggcctcgttcgggcggtccagggtcggctgaagttgctgacgaaggccggtcagctgacggaggaggaggcagaggtgcgtgtcctttcactgctgcttcactgcgatccgtcctgacacaccgctctctcgaccgttcccaaagcgcgcggcaggctcgctcaacgatttcaagacgttcttcccttcgcgctcggccgcaaagggctcggagctcgtgctcgttaagctcccggccaacgccgggctcgccgtcgagtttgagggccaggtcctcggcacgctcgatgatcccatcgtcggccgcgaggtgtttgcaagctatttcctcgacggcggtaaggagatcagcccgaaggtgcgccatccccgatgcggacgagatgctgttccggcagctgactagatccctctgatccgttcgtcacccctcagctcaagcagtcgatcgtcgagggctaccagaaccggccgcagtgataggatgcgctcgtacccgacatctgacgtcctggaggggaccccaacccgccgtctgagttgcaaggagagaagaggttatctagaggaccggtcggccagaaggagggaaagagcgtgagtgaggtacgggtgcgaaagcaaaagagaggacaacaggcgtgtgcaaagagggtgcgagctgctgagcagtgtccggagagaccaaagaaagacggcagggggcttttggaaaggggggtttgcgatgagattaaggtggttgcgctaggttaggctggcggcgatcattgccagggccagtgcccatggtccgacgctgacgggtgtcgaccagccgtgctgggaagggcgggctgtgactggcgctgccgactgctctggctggacgacgacgagcgtcgcccagtcgggcccgcaggctgcgttggtcaggttgacggcgcgaccgtaaacggccgagagagcggtcgcgctcttggccgccaagcccgagctggcgtaggtcgccatcagggcttttgagcagggcgagcaggtgggcttggtcgaaggcggcaggctgcggggggtgggtgcgaaacggtcctgtcagctcgggtacactggtgtgaacggggaggtagcaggtcacttacgtctgcccctgccacaggccccagtagtaagactcgtcggctccagctgcgctcgtggcgctcaggaagcagttcgtgccgtcgtcgtcgacaagactcgaggcgttgtggaccagcgagtacgtctcgaagcctgagagaaatggggagtcagtcaaagcagcgcgaccgacttggacatgaagggctggcaagactaacctgtcagggcctggctggccagggcgttgccggacttaaggtcagccgagcactgtttcgccatctggcccccgagcgcctccatggccgagctgcaagtagcggcgccgccggtcggctcgaggctcgcctggacgacagccgcaagcggctcgaggtctgcggcccgcgtgagtttggcaaaggcggccgacgacggcagcaggaacgagagcggcctgcagtcgatgtatgttgggtcggtcaagaactggccgaagaatttgaggcagggagcagtgaagttgagcgaaaacgtcgtgtcgaacggcttggggctgcgtggtgaggagtgccaggtctcgggtcagctgggcagctcgagcgaagctgtgagggcacagatcgtcgaagccagactcacaaaggatcgggcactggcatgccaccgctgagtgttggtatcggccggcctcctccgctggctttgttgctgctcgacggttcgccagcggctgagcctttcgactccatcgccgcagaggaagatgaggaagccgcagcgaccgtctccgctagcgcgtctgtcgtcgatgcttcgaaagtcgtagctgaaggagtgtcggtcggcgtcgacggctgtaccgtattgccctcggtcgcagactcttcgccggaagcagtcctttccggctcggcctcctgctgtcgcctggcaagccgttggtgcgtgctctgcctctgccgaatggtctggccatcgcccatggccgacgaatgtgagcgtcggcgtgcattgacgcttgcactgtcgtccgctgagctgatgatcgcccgggacaggctcgccggctcgtcgtcgaccgtgccgctgctgctggctgccgagctcagccgacggccagatgacgacgatggcgatgacgaagtctgcgctggcgtcgtttcgggcaaggacgacaccggcgacggctggacaagagggatcgacggccggacgtctgctgctgctgcgggcgccggcaagcgaaccagcctagcgggcgagctcgggccgtcggttgcgacgtactcgccggagccgagtgtctgatcctgctggatagcagatgcctgcggggcaaagacgagaaccgaggcgacgaggagcgagagcgcgagccggcgtcgacggttgggtccgggtcggggacgggatgttgatgaaggcgaggagggcatggccggaacgcgcattgaggggagcgaaggctgagggcgaccgcgagagtaatgtaggggagtcaaaggagcgtcggttgaaagtagcgagcgtctttccgtcggagcttgagcagctctgctcaaaaggaggggcgacgagaagaggtgaagtgaccgggtcggcgcgtcgtcccgagggaggtcgaaggcgaaaagggatcggcggcctgacgcgaagaaggtcgtcggcagccaagcaagggcggcagtcatctcgtcagtcacggcgtccgtctgccaactgcgaaaggaggaaggtcggatgacgcccgccggcccttgtcttcgacccgaccatcaaagggccgggcgggtctagcgagcgtctgcctggccgcccgtgccggtcgaccaagggacgactcccagcaaagcaagcaggccggtcttgcgttacgcgacctgtcgctactggcctagaggagtagacaggcactaaccgacagagaaaagaactggaagagggggggttgaagactgggagagggcgaggaggcgacgacgcctcgccgcctggcagggtcgcgcagcagcagcggcgacgacgtcgagggaaggccgccggttgggtttgccctgtcgctcaacagcgacctcgacgaacggcaacttcagccagccaggagccatcgcttagtcagtgttggagagcagatctcggcggtgctcccgcttcgaaactgacgagtgactcgcactcacccaggctgcctctgcgagctcgtcgtctgtctcgcctggacctctcgctcgccctggacgacgatggtcgacggccgcctcgagcagcccctctcgcgacgagtgctacctgaaccgccgacgctcaccgtctcgacggcgcgctttgcatctcccttcccgagcccgcgacgcgagcgtgccgccggacacttgccaacctcgccctcgactcactcggcggcgcgaaccgagaggcatacacccacgtcgtcgactgccgcctcacctgcgacgacggcgtcactcggctcgctccctagcgagctcatcctcgccatcagcgcctacctctacctcccgccagacgagttctccaacgcccacagccggtcgccagacctctgcgcgcttggcctcgccagcggccggcgcgtccaggcgatcattcgagccgtcctctttcgccaggtcggcctccggagccagtccgaggttcgcttcttcgtccggcggtccgatctggcttctctcgtcaggttcgtcttgatggacgtgcggcttaatttggcgcgcgctgccctgccgctcaccacccctgttgaccttcaggagtcttgccattcagtcgtcgaccatcaagcattacctgccgctcctgcttccgctcatgcctgagctttcgatgctcatcctcagctgcaagatcgccctgcgagatctcgccctgctcgagcctccccagcccgcctcgccgcccgacgacggtccccttctcgcagcggccctcacctcgtcaatgtcctcacccgccggcgagccggcaagcatgccgagcctaacgagccttaggctcgagctgtcggagcctctctcggccaagcttatcaagacgctcctccgatcctcgctcgtcggcaaggtcgaagacctcggcatttcggcgcgctttatccgtctggggctcatggcggacgttgtcgaacttccggaagtcgagctcgtatgtcgctggctgctcgcatcaagcagatgctcgaggacgactgactcttgcacgcccgcgctcgacgtcagatcgccatcgtcgacgaggtcgtccgcggcttgccgactctgcgacggctcgctctacctctgacaccggccccaaatcaagtcgacggaccttcgctcgacgtcgaccttcacctgggtctagaatcaagctcttcgcccccgcggacgacgaccgacctcgcctcctccttaccggccgtcgtctcgcacaccgagggtggccgcggcctcacctcgctgccagcgacgccatccttcacgcttgccccgccagctggccttgccttcctttcctcaatcgcaagtaaacccgcccctgcgccttgctcgctcgagtcggagctccggagccgcttcttcccgccgctcgaacggcttcagctcggcgggtcggccggcgcggcgctcgaaatcgagcaaaaacgttagcgagcgacggccaaccctctcccgacgacatttctgaatcttctgcatcttttcttggctgtccagccgcatccttcatcttttcttgtcaccgatgtcaatgctcctgcgcttacctctcagcgaccgccgcgccatgtcgggcttcgctgactctgacatcccgcgttcgagtcacgaaaacctgcgtcgtgtccggcgaggccggccaccctgcgctcaacgagcacagagagctgagcctcaaaagccggaaggcgatcgacccgagcagggccaaggggaaggggacaccagaaatccgtcgtgttgccccgaccctccgagttgaggtaccgacccctaaaagggagccggcgccgcgcatgggtctcaagagctggaagtcgacgctgcgctccgttcccggaggcggtcagacggccggccaagagaggtcacacgcaccgcacgacgcttggcaacacctgcgagcgacaggagccgtctccccgcttcccccaaccgggcgcagagcggccgagcggcgaaagtcgcggatcttagacggccttcgtcctgggtgggaagagagaggggactggtgcaggggaagggaaggcggttagcgagaggcagcaggggcagagagtccgagcgcgagcagaggaggacgcacagagtaggcggacggctcgtttcaccgttaaagttcgaccgacgttggagcaaatgacagggttcgagcggatgttggaagaggaggttgagacgagcttgacaggcgaatgggttcctccaaggggcggcctgtcatttgttccaacgaggtttaacctggacaatgatgttgtcgctctcgcggtggacgagtgcggtggacgagtgtctggtgcgtcgtcgccgtcccgctctggcctcgtcgctgctcaacgagcaggacacaacgcgagagcttgatgagagacgggggctcttttgagcccgttgcagccgccgctccatccatgcactagccagaggccagtgccagtgcaccttccggtgccaaggtggagagagcgctgagctggggtgcgtggcctcttttctgctcggaaggaagccggagcccgcaagagatcggaccgcctccctgtctgggctgacgagggaggggtcgagtcggtcggcaggcaaagcgcggcctttggcctgctcggtgctgcagcgaaggccaggaggaagatgatcagcgagctgcgtgtagggtaaacgttagctggactcactgcggagtcgcgggtggtggtcaagaagatgcgggcgccggcctcctctcgaggtcaggggcaggccaggctgctgcgcgtttcccgctgctgccaagctcgagtcgagtcgtccttgcccgacccgtcgtcctgtcgaccaaccaccatcaacgaccctacatagcatccagcaatggcagcaggcgctctcgccaactactggtccagaggccacaacaagcctgtcagccggcgccgacttctggcgctcgtccgcgtctgttcgtcccgtcccgccctcggcccgcctctcgatgcccccttcgtcttgctgctcgcgagctgacccgtcctcttcatttgcttgcgtcagacgcgctcgaatgggcgctgacggtcgcctgctggggtctgttctatatcctcgaccgggtccgtcctttctccaggccgaacgctcgttgctgcctttcgcgcaggcagctcgcttcgcccgcgctcgccggtcgagctgtcaccacctcgaggtcctcatcgctaacctctctttctcttttgcccatcaggtggacggcttccggcgcgagtttgacctcgacgatacttcgcttcagcacacctatgccgtctgtcctccctttaaaccctccaggctctcatcgcgtactccaagcgacgcgcagccgactgattaactgcggcccccttgctttgcctgcttgcagaccgagtcgaccgtctcggcgacgaacctctacctgattgccctcctcgcgccggcagtcgtcatcctgctcgtcagcgtcggctgggagcgctccgtctgggactggaacgttggctggctcggcctgtaggtcgtgctctcgagggcgctttcaacgtttgagtcggcaggctgactggcgtcggtcgccttttgtcgtgcagggcactgtcgctcgccgtcaccaatacggccaccaacatcatgaagatcaccgtcggtcgaccgcgacccgacatcctcgtgcgtcctctccaacacctcctcgccccccttcccttgcctgacgccgcccgtcgcccgcaacccgcaggaccgctgccgacctgccctcaactcagcaaaccccaccctcggtctctcgacctcctccatctgccagcgcacaacgctcctgaaggacggctttcggtcgttcccctcgggccacgcctcgctctccgcctgcggcatggtctacctcacgctctacctcgccggcaagatgcgcgtctgggatagcaagggcgtcagcctaaagtcgtgggttctcctcgcgccgctgagcgtcggcgcgctcgtcgctatctcacggtctgtcctttcgtaacctccgaccttacttgtgtctccgcgcgcgctgacctcctccccgggcttcgcaggctctgcgactaccgccatcacccgaccgacgtcctcttcggctccctcctcgggacggccatcgcaagctacacctacacgctctactaccggccgatctccggccctcgtactggccggccgtactcgccgagagtcgcgcgcgagccgactctgggcgccaccggcggtggagaggcgggtgatgaggaggccggtctgggcgaggtagggcgcgcaaagcgagcggacaggtcgtcagtcgacgacgatgatgacgaggaggacgagggcgggcgaagagcagggcctgagtcgctcgagctccagcggggcttgttggcgccgagcgcaaggagagcggacgggaaggacgacgacgggctcgacaagagcccgaacgctgctggacttacatgattcctctcctccctctcgcgccgtttctcgccgaagtcgagtcagggcttgcgactcgtgtctcgccgacagggaggggagggggggcttcgagatgcgtgcgtgcgtcggccggaagagaatttagttctacagcagcatcgatcgttacaggcaaagcagtccatgcagggcatagaggcgtaagacggcccggccacgcacggtcaacgtcgggcgggtgggggtgtgagtggcagctcgtccatagaggttgtcccaatcgatattggacagcgaggcgtcatgaggcagagcattgagggcgtgcgatggcatgctaggatcgaaagctgaagtacgccgcgagactgagggatgacgcggcgagagcacattcgcctcaacgccgacggtcgcatcgtcggtcgacaactgccaggaccgcgagccagcgagacgccccagatagtccgccaacgccgcagagcaacagaaggcagcatagggatacacgacgaaagggtgcagcatgagagggggcttcgtcgtctactcgtcggactcgtccttgcccgagcgggccttttcgtcggcctggacgcgctccttgagctcctgcaaatgggccaccaagatgtgagagcatcagcacgacagctctcttcagcgccccgtgcgcaggactcgagacgcaccttctggttggccgagtaggtcgcgagctgaatcttgtcgcgcgagccctccttggtcgtcgggtcgctgcccttcttggggtcgttgcctccgcgatccttctcctcagcctccttgagccgctcggcgctcgcgctgacgggcgtcttgaacgcgctcgccgcctcgcccgacggctggcccgactttccgacgcggtgcgcgtccggctccgggacgtggccctcggggccggcgacaccgcgcggggcggcgccctgggcgttcagggacgacatcggtccgtcgagggtgatcttcgcctcggaggaggagccgccgctgccgctgaaggaggagggcgtcgacgagttggcctcctcgacagccttagcctcggccgggtcaccgtcggcggcctaagcggacagggagaaagagagaagaggagtcagcggtcgcagtcacgctaccaaccacgcccgaggcgccgtcgtccaataggggagaacgcacgatcgcctgctcagcgctcgcctcctcgctgtcgtgcgagccctcgacctcgttcacgaccgacttctcctcgtgctcctcagcctcctcttgcgcctcctcgtgcttctcggcgtggctgtcgtggccgtggccgtggtcgtcgtggccgtggccgccgccggccttgaatttccggaggtcgttgacgacataggcgccgagcgggaggaagacggcagccgatccaatctatgaggcgagcgagtttgagtagggtcaaaggcaaggtcaggacgagagacgcttggtcaggccatgagtaaagctggtggaagaagcgcgacgacgacggaaggcggcggcggcggcaacggcggtagaatcctccgaccgaccgaccgcccgctcggctgatagtggagtgcaagggatggcagacgagaagggcaaggtagcggacgtacgacccagggcatgtcggacgtctgcttgtgctcgccatgagcagaggcgctgcgaaggaggagcaggcggatggtcagcgctcgagcatgtgaagagacgctcgaagacccggtctggcaaggccccttctggacctcggtcggtcgggcgagcctccctggccggtcaaccgctcgctcgaggacgagctagcagaccgaggggcacctctcgccgaagggttgtccagaccggtcaccagagagcggcgagcggccgtatgcggcgagcccccgactgagagatggggcggcgcggccgggccttcgcgagaggacgagcacgcactagcgccggagcgggttgacagtacgcgacgagctcgtcgtagcgcgggcaacggcccgggagcggagagaacggatgagaggggcagacatggcgtggcgtagagtgtcggagggaggaatggtggtttgcaggagcggaacgatctccgccctcgcggccctttcgggcagggtcgcccgacgtcatgcacaagggggaattattaaagcctcggcctccgtcgtctgctcgaccagaggtccgttcattctaccggtcgccctcgagaaacagatcttctactagagcagcacctcgttcgcagccgagtagccgaggttcttggccggcaggacgatgcacgaccggacgcagatctcacgggcgaccgtcacgtcggacgctgcgggccatgccgacagaggtcaacctcagatcgaataaaggaagcgaggcaagcgcggacgcaccgaggatcgtgacgagctttttcgactggacctcgcccggcttggcgagctctggctcgcccgagacgcgagcccaggaaccactgtcgagtgggggcgacgggcgacggcaggaagagaggagggaggagcgatcggggtttgcgtcagccgctggttcgagttgcttttctcgtcgtaggcggacgagcaacagcaaggaaagacgacgaacatcttgcagtcgccgccgacgatcgaccagacgacacacgcgtgcctgccgacctggacgccgtcgagcaagatgctgttggcgacccgcgcccccgcctcgacgaccgtgttcggcccgatcgcgacgttgggcccgatctttgcgctcgggtcgaccgtcgcatccgggtggatgtagacggcgccgacaatctcgggcccagtgcgcttctcgtccgtcggcggaggggcgacggtgctcgcccgtcggaatggcgacgcaggcgtcaggagctcgggtgagtgcttgacgaaatgctcgaggtaggccgacgaggcggccagggccgagccggcgctcttgatctggagccaaaagtcggccgtctcgagcgcaaagagcttgtgggccgacgcgagcagcgggaggacgtcgtgctcgaggtggacgatctcggctgcgtcggccagagggtcctcggccgcctgccgggccttgtcgtccattgcgcgctttatctcgccaaagatctcagtgctaaacaggtagatgccggcgttgatccggtcggagacaaagctctcgggcttctcaacatagtggacggcgagaccgccctttgatgagcccgagccggacgatgagggctcgacgacgaccgagccgtagaggttgacggcggggccctcgcgcgcaggagggacctgcttgacgaggagcgtcccgaccccgcggtggtttgcgtggaagcgcccgagctcgccgagagggaacgacgagccgacgtcggcgttcaggaggaagaattgctttgggctgcctttcaagatcgagtcgcggaagtggtagagcccaccggcggtccctagcggccggtactcgcgcaggtagttgaccgtgacgtttgggaactcgcgccgcgccgagcggaggaaatcggtgaagacggcgtcctcgtagacgccaatcaggaggatctcggagaggtctgcgacggcagagagggcgcggagggcgtgccagatcatcggccggccggcgatcgggaagagcggcttgggagtgtcgagcgacagcggccggaagcgcgtgccctgcaagtgggaagaaaatggtgggaggctcagctaccgtaatggactcgaagctgagccaaagacggccgaggaaagagcggctttgtcgtctggtcggaaccgagagcaaggagagtgagacgggcagccgagccgacgctctctccgagcctcgctgtcggcccctctgctccctcgcggccaaaatactgcgagctcatcgcgacgatatgagctgccctgtatgttcctccgggaaccggcagtcaggacgctccagaggccagcccgcgaggacgcgcgagatgctcgaccgtgcgcgcgcaggaagggagtgcgggactaaccttggcagggccgccgacgagaatgatacctggcgcgagtggcgcggatcaagagcgggtcagacgcgctcctctcctatcgatgcgtccagtcacgcaccttttgtagacatttgtgtaaaatgagggcgggagatggtcgggaacggagagaggcgagatggacggggctgagacttgttgatgcgcaggcgatgcacgatgacagggtgccggccgagggcgcgacttgctttcgccgccctgtggcccttcctcctgtcactccgtcgtccagcccacccagtcactcgtttcccccaacatctcctttagagcaaagcacaacgttcggatcagcacacggtcttactcctcctccgtcagccgcccggccatgcccgccgccgccgccgccaaaagaggctcggtcctcagcctgacgacgacggccttcctcctcgtcctcctcgccgcctcgccctcgcccgcggccgcccacagcccggtcggctcatccaacgtcagctctggtagctctggtggccacggctcgctcaaacgccggtcaaacatcctcgctggcggtgacggactcgagagggagctcgccgagcgcgagcgcgcgaggctccgtgctagcggacgcgaacgcgatcttggtgcgttcctccctctgccttccttctccctgctttctgccctatccgatcgaggccgctctttgggtctgaggtcgctcatgcctgctctcgcggtggccgatggagcgaggtgggtcgggtgggatgtgggctcgcccagccggtggccgaacaagcaacgcgaggcgagccactgggcggtcgatcatcttcgagccgccttgctcccacgtccgtcctcgacctaggaaggaggtgctcgggcgccgtagagtagaggcggaagacaagcagcctcaggcgtgcgctggggttgctgaggccaggaggaagctctgatgtcggctggagctctgaagccgagccccgacggcccctgttggcgagctcgaccgaccgacccgcacaacaaacacccccctcggcgaacccgcggccgcagccctcctcccctccccctcaatcactttactgacccatgccccttcacgatctctcacctgcacagcagccgacgtccttgctgcgcttgccgcgctcgacccgagccaggtcgaagctgccgctgcgtcgtacgccgctgccgagcaggctgcgaatgcgctcgcctcgagctcgagcgtctccgcagcagcggtcgcggctgcaacagcgaccagcagcgatagcaccagcagcagcagctcgtcgatcgagccgtctgtcgctgaggctctcgctacgagcagcaccgcgcctccgccagccgccgaaagctcgagcgagagctcgtccatcgcgcaggtcgcgacggacccgtctccctctccctcatcggccgaggccccggcttcgagtagcaccaccgacgaggccaatctcctctcgtcaatcgtcgctctcccttcggtccttctctccccttcgccctcgccctcggcatcgtccgaggttgcggtcgagcccacgcccacgccggcgacagagtcggcgagcgcttcgacagcgccaacgtcccacagcagctctgctgtcgtcgactcgtccccctctccatccccgtcggcggacgcctcgtcgtcgacgtcagtcgaggctccggcgccaacctctgtcgcccctgcggtgatctccagctcgcccgaggtcgccgccggcccgagtaccagcgcgagcggcgcgcccttcgagagcgcctctccgtcggccaccgtcgtcatcgagtcggccaccgcgctcgctgcaagcccgagctcaagcgagagcgtccctcccggtatcgtgccttcggccgtcgtcgtcgcctcgtcctcctccgcgtcggttgcagcagcggcagcgatggcggccgagtcaacgtccgctccgaaccccgagccgacgccgacgttgcccaccgtctcttccgcactcgagtcggtactctcgtcagcctcgcaggttgtcgagcccgtggtgtccgtcgtgtcgagcgccgctgtcgccgttgaaacgactgctgccctcgtcggcggcgagtcggcctcgagcccgtcgacgacgtctgccgcaggggccgtcgagccgacggcgtcgatctcagcttcggcggcggcggcggatggaacgaccgagccggcctcatctgcttcggccagcgcccccgcggcgcttgctgctagctcgtccgacgccggcctgcctttgccttccgtctcggcctccgcttccgcctccgtctcggtcgcgccgttcggagggctcgtgtcgtccgccgtctcgcgcggcgccgctgagcagcagcccactggctcgtcgagcacagccgctgctccgtccgccagcagcagcagcggcggcagcgacgagcagccaattcgctcctcgtcctcggacgccccttcgccttcctcctacgagggctcgaggccggccgagccgtccctgtcctcctctgccgccggtgaggccgggtcgtccgcctcggtgtcgagggcgagcggtgtcgggtcgtcagctgcagtggccggcccctcggcctccgggtcggcctctgcgtccgattcttgggccatgcctgccgcctcgtcgtcgtctgcggcggcttccgcctccgcctcggcttcctttagcggcggcgctctcggctcgtcggtcgttgctgccccgtcgtcgtcggccccggcctcgtcttcggcctccacagacgacaacgtctggatcccctcgcagacgcagctcatcattgccgctccctcgacccggttgtcctctgccggccctgctccttcgtcctccgccttcgacaacggctcgaacccttcatcggtcgctggcgctggcagctccgtctctggtgccggtcgggcgagctcggccgtctcgtcagccgacaagagcacgccaacgggcgcgaccgtcagcgaggacctgccgtcggtcattctgcccgccggccggtcgacgacgtccagcacgacatcctctggcagtggcagcgagacgacgaccgagaaccagtccagcaccgtctcgattctctactcgagcgctctcaagtgggactttgtcgcgaccaactcggacgtcattggccagctcatctactacagtgcgtcgtcccaacctcttcgtcctgcgtgactcccccttcttgcctgctgatacgcgcattctgcacgatcagcgcccgacctgcttgccaaggcgctcaacctcgacagcggcgccgtctcgacctcgatgctcaaggcctaccgctctgcctcgatcgacggcgcgcctgccgaagtcctgacgctctggctcggtctcgtgccctcggccgtcgtcgacgacctccaggcccagctcaaggcgggcaacagcgccttctataaccagacgggcctcctcggcgagctcgcaaaccaggtcgacccgtcctacccgctcgtttcactcacttcgctcgccgcggcctcgaacggccagagcggctccggcaccgaggccgaagacgacggcagagcggctcgccagcgacgcgacatcatcatcggcgtgaccgtctcgatcggcggttttctctggatctgcctcgtcggcttcatctaccgccggctccggcgcaaggccaaggccgacatccaccggcggatgagcatgaacccgacgctctccggccgcaacctagccgccgtccagatgatggccggccactctgctgccggcagtgggcactcaagcggcggcaggagcagctcggtcgatctcgacgctcggccgtcgagcttctacgcgtttgacggtgcgagcgacagcgcttccatcggtggctcatctcggtgcgcccccctcccctaccttcttgcctacgggatgtcgtgctgacatcgcccttttgtcgttgctttcgagcagcttctccaccctctaccgcgcgatcgccgggatcggctctcactcaccgacctcgccgacggcgctgcagagccagcagcaacagcagccgacgaccaaggccgcccggcgccggacaggcgcaggtgttggcattggcgcgatcggctcgccgaccaacttccagcacgtgctcgacaacccagtcaaccccttcgcgaaccagggcccccggcctgagatgcgccaggtgcacggctacgaggccgacccgttcgctgacccgcaggcgtacggccagccgcacgggtactatgaccagggggcgcaggcgcccgttcgccaggtctacggccagggcgttcagcgcaagggcgtccgtccgcaggatatttcgggaccggtgcgtcttaattccggccacgttgcaagtaccagctcaagagactgaattcctcgtccctatcctcccgcttgacagacgcttcgcgagtcgagcctaggcctctgaaccgataaccctttccttttcagatctcctgccctcttcattcctagctcctccttcctggctcttgtgctcctgcaaccggttctctcgaaatgccgcctctttggtgccgcccccctccttccttttggacgctttctcctcaccctccagtctagaccccttttggtagaccctgcccccctcgtctatgttacccgcggcctcggcccgcccaccgctctctctcccctgcttgttccctttgcccgcgctatagcccatgcacctcggtcgtctgctccgccgaggtggtgcctcgagccgctcgctgatgtgcatctcagatatccgggccgtgtcgcgccttgttgacctcgacactgctgctctccggccggtcaagaggcggctcaaagaagtccccgctgatgaccttgttgccagatcttcggctgggcgcgcgctgccggaaggttgaggcaggcagaggaaagcccatcagcctatcgcactctgtcggtccctcgctgagcttgaaccaagacgtacctggcgctcctgagccttctcctccgctgccatagcagccgtcgcacggtacgtctggggaaagacctcggccgggtgctcaatcagcagccgaacgatctcgccgagcgttgtcggccggtcagtctgctgcgctggcgagttgggatggcctggccgagcggggtctggtacgagaaagagaagagcgtcctcatgcgggctggcggagcgaatgagactgtgagacaggcaggacaagagagcacggccaagtcagtagagtttcgtgtgctgagaggaaagcgcgtgtacttcggcgtgaagacgatggcaaggttggccgccgtcatctgattcgtcggctggagcgatgtgtcgtgcagaagatctggacaaacgcggctttcaatcagggagaatgtcgttgagggagggcgagaacagcaacgcacagatggcatggccgagcagccgtttagcctccggtgcgagcggcctgagtaatcgggcagccgtcgtctgatcagtcacaggctgttcaagctggagtagaggggttgatgttgaacgcacccgacgatccgatccttgatgtaggccagcgcaggaccgctgtccttcgggcaggcccggatgaccgggtagatttttggcccaaggagcggagcggggagctccctgaacaaggtcttgatgagcacagccgcgacgtgggcgtcgtcaaacagctcgagatcgacgggcgagccacggtcaaacgcctcctcgaccgcaaggaggatgccgcgagagggcgacttgcggaagaggccttccgtcgccagccggccggaacgtcttaggaacgctgagctttggacgagaacgcgcggcaggggcgcttctgacgaaggcatcagggttgagagtggccggccgaagacttcggggctggctggtgagggaaggttgacgcttgactccagcaggaggttcgctctgcggaggtgtgcagcgtcggtagatcagccgccacctgacgtgttcgcctacaagtaagcggaacgcacttgactgcctcaggtggagtgaggatctggcgcatcggcacaacggcagcgaggtcactgagcgtcctcaggtaggcgatcttccggaagaactttggcgagatgagcggcgtggcgagggtaaagagcgctgcagaggtccgcaaggagtcagcgggctgtcgtcagagaccacattagtgctgtcggggcacactcgtggtgaaaaacgttgggtggacgagatactgatgcatgcacaggtgcggaggcaaggaagggcgcagtcagtcttccgcgagcaaggctgccctatgaggatcgaagggcgtacgagctgtcgaaggttcttgcgaaagggccggcccagactgctccaggcgccccaaaaccaagagagcggcgggtaatgcttgccgccggcggcgaagaggacgagaacgtagtcgacttcgactgagggaagcgtcgtgcccgtgcgaggctggcggtcagcatccggcttctagcttcgacctcgaatgcaatcgcaggctcaccccagctctggagggtctcgacgagatgaatgaggagtctattgtgagatacgtgttgtgggtctggtaggaggctcgcagcgatgcagattatgggtcggcctctggtacacggggagcgaggtcggggcgcacggagcgggtgagagaagagggtgagagaagatagcatcagccgacgcgttcatcgcctgatacaggcaatccttcgtagagaaccatacgtactcgctgtctcgtcctgcctgccagcagagtcgttggagggcctcatccgctcgccgcaggctatcgtcctcgtcgttgttgtcgtcgctgcgcagctcgccgagcaagccgagccctgccccgccggcattgggcccgcgaatagtctgtgaccagccggcgctggctgccgccgggaaggaggcgagcgtactgaatgcggccgatgctgatgttgggagccgagctcggagcgaggagaaggccatggcgaggtcgggaaggaagtgatggtcgggcggagggagaaccggccggcgtcgctccggcttcctcgcctcagacgaccaccttcgacttcgagctcacgccccctacgcactacctgtcagtcctgtggctgttcgatgtcagaggcgctctcttggctgacgtcccgccggtcctgaccttcagaaagactccaggaactctcccaactcggtcacaccagccagcacctccgtccgcagcctcatctcgcttcgccacatttccgccacgtccgaccatctttgcccatgccgcccaagtacgagctcgactttgacgaggaggaagaggtcggacttctcggtggcaaagtcggagaccaggagccattggcagccgagcagcactcgtaccctccaacagcaccggccagcacaggagcacctcgctcggtcgtctaccacctgcgtccaaaatggccagtttcagacgatctccaggagcaggacgccgtctcggttgtcggccggaatagatcggtacgccttgagatctgatctggcatccttgcccaagacgactgactgcattcttggccgctgtctcgaacaggagagcgtcgctctcgtcatcgccgccttccctgagcttcgacggttcggtacgcctcgagaactcacctcacattaccccttgcgcaagaccactgagcgttttgtgaattagacgaggatcgaatccagtttttgatgccgtcggaccccttggctgctatcaacttcactacgaaatacgcccgcatcaccgatgctgcctggcagggattgactgccagcaccatccgggtcgagattgccgaccggccgggcgaggcacaactccgtgagtgctctacgccgagggcgctgcgcggccggccgtcactgactcgtcttgcttcattctcaggcaagcggagggagacccgaaaagtgatgtggacgatcgggctgtccatcggcttgcccatagcggtcatggcgattttctttaccttagtcgtcgtggcagggtagggcagggccgcgccgacttgcgactcgcttttcctcgccctccgcatacacgaccgctccgccttccgcactcgcaccttttgtaaacctgcttgacgactacctttgatacacgaagttttccttccagcccagagtcatctggttgtcagggatcctggccgttgtctggatcgtccctcgccgccacccacagccggtcgggcgccgtcatgccggccgttggagttgcaggaaactacctgggccaagatttgggccagtcatcgatcgaagcttagcgcaccgagaggagctggctggctgacagcactcgcgcgccggcatggtcggatcgttgcccgagggggcgtcgcaaaggccggcccgactgaaggcaggcgcgttatccccgccgctaaccgactcagggccctgccaagcagcatagcagcaccctgctcggcgcccgaattacctgatgctgaccgacatgaatcggcttgacgtcgacgtgagacggccgagtctgacggctgcatgtacgggacgagcgaggccgaacacagccgcgcgactgagccagaacagcggagcgagaaagcgatcgagagtcaaaccgcctcggctccgtcgccctgaatgctttctctgcgcggccaggccggctgctcttccgcctcccgtcaattctgagctaacgaaggtctgcgctgcccactgattcggccagagagcgctcgcatgagccggcctgatcgacggcgcctttgcctcgcgctgcctccttccgacgcgagcgaccatggctctcgtaacatcccagagtgctcgcggaaggttcgaccagcctcccctgaccccgatgccggatcacgatctgttgacgagcatcggcatctggtatgttgattgacttggtgagcggtataagaggcacggtcgttgggtaagtctcgtcttcttctcatcaccctccgcgccttatcatcggctctcagctctcctcgcccgcctcgctaccactcttccccttcgttcaccctcgacacaccatgcgcttctctgctgctgccttcctcctcgctgtcgcgtcgcttgcctcggccgccccggtcacggtccgtcgcacttaacacgcatctctcatgccattctagattgatcgctgacgtcttccttctcttcttccctccagcagcgcggtacgctcggaaaccttcagacgacggtcgagggggcgacggccaacctcggcacgaccgtcgccggtctgcccgcctctggaggcctcgtcggcaacctcgtcggcggcctccttggctttggcacccctgctgccctcggcactaccgtcaagggcctcggcaagggtctcggtccgactgtcggcggcctcgctacgagcggcggcgtcgtcggaaacctcgtcggtggactcgtcggccctgtcaaggtacgaccttgcccgtaagcctctcaacttggaacgatgctcactcgacccccttttctcatatagcgcggcaccctcggcaacctccagacgacggtggagggagccaccggcaacctgggcaagaccgtcgccggtctcgtcccctcgggcggactcgtcggcggccttgtcggaagcctcctcggcccggccacccccgtcgcgctcggaacgaccgtcaccggtctcggcaagggcctcggaccggtcgtcggaggcctggctacctcgggaggcgtcgtcggtggtctcgttggcggcctcgtcggtccggtcaagtgaatgcgactctcccagtcctagagatacctacttggacccgaccctcctcccctcttgcacatagcccacacctacttactccctccacaacactgtatacctgctcgagactcgctttcgatgataattccctccaccaatgactccacggtgctcctcagccgtcttggagagaagaaacaggacttgcgatgccactgctaacctcctcacttcttctgcagcttcttttgctgcttgagcatcgccttgcgcttctccttctcctcgagctgaaggcaagacaagcgggtcagccggcgcctgccatcagcagacggaagcggagcgcaccttggtccgctcctttgcgctcagcgcctcacgcgcctccttcttcttcttgagccgctcctcctcaacccgttcagtcttgctcttgcccgtcgtctccttttcgcgcgcctcgtcatattcgcgcttgagcttctcgacgatcgcccaggcttcgacccgcgtccggcggaacttgcggccgacgtcgggcgagatgtccagcaacggcgtgagggcggcggaaccgaggcccgacttggctccggatgcagcgggcggagggaggaggacgtcaaccgtgttaacgagcatgcgcaggtaggccgtcgtgaggtgagccggcagcggcagggcgagcgtgagggtgagcgtgagcggcgaggggaatggcagcgtcttggcgggccggacaatcgggatgtcggagatctgccaggaacgggcaagggtcagctgaccgagcacaaggaccaagccggcaagaagccatcacagacgatgtagttcttcagatacttgcgcgcctcgacgtcgtcgagcagctcgcgtaggccagtcccgctcccaaggaccgccttggtgacgtcggcgtgctcggcgaggacggcaagctccctgtcgacaccgctcaggctgtcggccacgacgcgcgggaagctcaggtcccatcgactcttacggacgcggtccatgccggccttttggaggacggcccaaacgccggtcgggaggccgtcacccttgtcggccggcgagccagggatatgaagactgtaggactttgagttagcgacggttgaggcaggcgggagaagcgcgagcgaaagcgtgagcgtgtccgatggtgtctcggccttgacgtcccagagcgggtagaggaaagtccggtagatgtacgagagcggatcctgccgggggatctggtgcagccgcgacgccgagccgaggacgaggttcggggcagcaaggtcagtttcgggcgacagcgtctggtgtatggcgtctccagcgcagcacagtttacgtcgggggaggcacgcacgaggtcgattgtcgagtgcaggctcatgacgcctcgacgacccgaggcgtacgagaggaacgtcgagccgccgtcctcgaccagcgggaacgagccgggctgctccgggttgggcgagagcgcgaggaactgctccttgagtgtcggcagagcgtccttcatcctgcaagtcgccgaggcagatgctgtcagcgcccagggaagatgtcacgagaagaaggacgacccgggacgaaccaggcagaggcgatgcgctggttccaggcccggccgacaaagtagaggacgacgtagccgacgacggcggcaagcaggaacggctcgtacgggtagttggccggcctgagaagcaagagccgaccagttttggagtcagctggcagttgcgacgagctgagggaagcccaagaggggacggctgctgctcaccgaaggacggcccagctgccgagcttgaactcgcggccgacgtagccatcgttgtggctcggcgcatcaagcgtgccgggtgagagcgcctctgtgagccctgtcaggaaggagaacatgaggcgagagagaaagagggtggcacgagaaggaggaacgagatgggtcggcgtcggagggcagcgacggtgagaggtcgcggtgctggccgaggcagccgtctctcctcgacccgttggccctggcaagtactctcgctcacgaagggaaggccgtcgctcttttatgatcttaacctacacacaaggcagtatatgtcctcgcggcgccggtgccttagcccgagtctgctgtacgacgcgccttgcgacccaggcgggacttcccagccagtccgacgtcgcctgtccttccgacacccttcgtcgtcgtcgtcctcatgaaagcagacatgcgatcgtcacgcccgcctgctggtatatgctctgcgctcagttggtcgctccgccgctctgttccgacgcgcaaggtgggggggtcgtcagtattcgctcgctcacacgcggcacagcccgcctcgatagacgaagcgacgaaagaacaaaccatgatggcctccatctcgttgtcctcgatccggtagcccccaaggatgagccggcgaggcaggagcatgtcgtcctcaaagtcaatggccttgccggtgccgacccacgaccgggcggctttactcggcgcggcggccgggctgctcgacgagccagatgacggcgcggacgacgacgacgaggaggcggaagacgagctggcggcggccgagagggccgagaggaatggcgaggcagagacgatcgatgcgatcgccgacggatgcggggcgggcgtgctcgagtctgcgagtgagagagaggtggccgaggtatagggaggacgaggggcaggtgtcagcgcaaccaggagggacagccggcctgaaagaggagagggcgactgacggttggaccaccggtcacggccgatgaaacggatcatgggagtccggcggaggatgagcgaggcgtgcatgctgagcgaaagagcgagagagagagagagaacggaaggcggtacagagggaatgacggttggcaggagcgagaggcgaagctgctgttgctcgcgacgtcggccggcactcgacttcgccctcgaaccatcagcatcgcctcgcatcccaacagctgcacgatggccagaccgcatccgctttcccgttcgatcctgccgacggcaggcccatcgtcgctttcatcgcaggcctacgacccaacgccgtcgtcgccttcggccgcgccctttgcccggcaccacgcccggccgctcaagcgctcgaggctcaacccggcagcagcagcgtcttcggcgacggctccttcgctcgggagcgaggccgctcgcaagtcggcgccggctcctcctgccgtcgacttcacggccgctcaggcgtcgggcgctctccagcgggtgattgcaagcgcgctggccgaggccggcttcgacggcgcgcaggccgacgtgctttgggcggtcgaggaccaggtcgtcagctgtcagtcctctcactcgcattgccaggccgctcgatgaatactgacacctacttgcgccccccagggatgaatcttctcctttcctctgcgaaggaccggtccgagcagctaggccggcggacgcgacccaacgcacgcgacctattcgccgcaaccgtcgctgacggccacctgacgctcgacgaactgtcgccggccggccaggagggcttcctgcttcgcggcaagccagtcggtgcgtgcatcatctagcgcacgacggagggccgtctccttgctaatgccgtcgttcccttccgccacgcccctgggagacagcgtccgagtcgctgtacgagatcctccctccgccagctccgcctccagcattcctgcccttgggctttgaacccttgccaagcccaacgacctcgacctcgggcaagccgtccaagcacgccctgccacccctaccctacgcacctgcgcaccttccgccgctgccgccagcccattcgtacaaagccaccccggcaccctcgtctcctccccgaccggacccagcaacacgcgcagccgacatcgccgagctcgaggaacgctacggccagacgcggacagtcgagcgggcgctcgtccgcctgatcgaccggacgacgcatgccggcaaggaggggagcatcgaggagggtctgcgcgatctcggcctcggcgtcgtcggctggcgagttcgcgagagaaagcgcggtagtggggctgtctgagatcatttccgtgctacgtattggcgtcgtagttcgaggccagctgagggaatgcgtgagaacgcttgacgggaggtgtgcgccccgccagagagccagcgaaggtagcaatacctgcagtcaggtcggccaggacacttaggacagggagagtcaggccaagtgctcacaggccaagtgcttgcctgtcagattactcgtcgagactcattaagacccggagcgtcgagtcggctgctcgacgcgcaggcagggcttccctctgccctctcaccctcacctcctccgaccccttcaagatgtcttcaaacatcctctcgacgttcttcccgcccgcctcgggcgagtcgccgacgcccgtccaggacgactgtgcctcgtgccggctgacgggcggcctgacggctttcggcctggcagcgtatgccgggcggctcgcgcagaaggcgcccaaggcggcgagcccagcctcgctccggggtggacttctcctcggtagtctggcggtctgtgcgtctcgcttttctcgcagtcgttgtccagcctgaagagggctgctgccgagatccagatgctgacgtgggccttgtacacgactctttcggcagcgttcgcggccatcggcgtcggtcggctctccggcctgcggcttgacaatgcaggcgggctcacgacggctatgacgctcgagcgcgaggctctcgccgcgaagcagagctagagaggtcgcttttttgcgtaggtcttctctgaaggagctgcgagagtcgcgtcctgagcgtcatggcagacgtctcggttgggtgctccgtcctccgtcgatgctgggcgagtcgttggcttctttccctctgtgagtcggtttctcgtctgcgcacggcacaagcagtcagactgacccctctcaactcgttgtgaccctaccagtgtcgcggaactgctcgcttgatacttcggctccgccgctgcgttcgaggccgagagcgtctggaccggcgagcgcaccgatccaccgcctcatcaggccgcagccgatccggttcgtacagcgctacttgtgtaacaggcctgatgcgcgtactgacctattgacctgcccacttgataggcccaaagttctgcttctcggctagacgagcgatgacaggcggcgccgtgagcggtgtcgcgcgacccagttgggatgcatgctatcacagactttaacgagacagcggcgtggagaccaggagcaggtcgacgaggtctcagagagcaaaggggagctgtggcggcagcctgccgtctcgtcgtgccgggccgactggagcacacgcgtcgtcgtcggctggctcgccggcgcagagctcagctgggcctgacgtcgacaccttcgccaccgaccacatcctcctccaccatctctccctctacaatgtcgtcactcaagccagccacctcgtcaactcctcctctgccagtccagacgcataaggaggcctgtgcgccctgcatgctcgccgtgggcctcggcgtctttgccgtcggcgcgctcgccgccgccaaggccggccgcgacccgtcgccgtctcgcaaggtcaactgggccttaaacggtctcgcaggccgtacgtcgtcccacctcagtggttgtaaggcaggctcgatactgactgctgcctttgcccatcgcagtcgccggaggctacggctggcggacgctctccgagctcaccgtcaaggacggccggctcgaggtccggacctacgcctgagcgagcgcgcccaggtcggggcaaagcgcccgtggccgggtccatcttatgtctcgcgctcagtcaggaccgttcggtccgatgcggtcgtcggcgacaggccgggtgcaggatgggtcgcctttgcggcctcacgcagcggacgccaacctgtcgcctcattctccctccgagtcaactagaggaggttcggccctgccgacctcggcgtcgtcctcgctgagcttcaaggctcaggaggcgcagagtctcgccaatcgacggcatgcgtgcgtcgccctcctccttgccctcggcgttgcgctcgaataaggctgacctcgcaaccagccattcgatttgcaggtgcttcccgccgtctactccgagcgctcacgacgcccctgcgtgcttgtcggcggtcttctttcgcagcgatcatagccagcagcaggagccttctcgttgcggcgctcgccctcccggtctctcttctgccctgtgcccttctcctgcgttgtccgtttgctctcgagcccatcaccgtcacttcagaaccttcatgctctgcgatatgctttccgctgtctggaagttcctcagagagggtattgaggatctgccgcgatggcaagcaggtacggcagccctccccctctcgtccggcggtcgacggtccaacctttcgacatggccggcatcaagcccgttccgttctcggtcgacggcctctagacaacggcggccaaggtgagtgctctcccgctctctcctctccttcacaccctcgatgcccctgctgacctagtctgcctgctctccgtcctcctcgcagtctctctcgcgcacattggcaccctctttcccatcggcgacatccttcgacaggcctcaagaagccggctgggtctcgaagggctctccggcagccctgcttcgactcgggcgacctggtccattggactgggcgctcgttgggccgggcgatttctcctcttcctctcctgttcccctgccctccttccttttgatcatcttccgccgaacgactccctggacctgaccgctctcgtcagctgcgagggcgacgtcatcggtcagtcggagcgccgtcagtgagaacgaggtcagcgcaggctcgctactggctcatgtcacaccctcctcccttcacagggtcctccatcgcaccctgcctttgcgccgtatcgcttgtacgaatttaccatgtcgtcaccgaccaacgagacgggtcggatcgccgccctctggcgacagcgccgacgcctcgagtgcgtccgtcatctcgctcacgccctcggtctgccctttccctgtaagcgcgcccggctcgccgatgaacgatcgttccctgagggtgcggagaatctggccctcgaggttgactaggatccggccccggttggcgtcggcgcccatcgcctgcgaggcggccgtcaagctcggcggaagggcaaaggaaaggaggatctggcgaccaagcttgcgcgctggtgcagcgagacgagcagaatgtcagaccagaccgatattgctcgaaaggaaggggagacgcaccgagccggagcgagatggggagggcaatgtcggtcggtgatgacgagcggtagagcgtcgtcccgactgccggcctgtccttctggtcaaagggagacgacccgtcagctccttgtccccgagacgccgtagtagcacaccaggccaacatctacgtacgctcgctgacggcatgccgcaaacccactcgccggcgagcctccgaccggccgtcggtcgtggctggtgggccgagctcgcgccgacccagagcagggtcgaggccgggccgaggtccgtcacctggaggaggaaggcgggcgcgccgagcgcatgttcgagcggcggcagcaggtaggtcgacggcgtcatggcttgttagatcgagttgcgatgggagagcgagtcgtggcttagggccatgctgctcagccggcgaaacgacgcgccttcgtctcgcgcggctgggcgggcggaggcgctcgaccccctccgacgacatccttcgccgaccaagccaagccagtccgtctttcgagcagcccgagagccctttgcagcagtcatgtcgggaccgggaggatcgtaccagggcccagccggcggatctcaaggctgtgcgtcgcgacctgggcttcgatccggtctcttccctcctgttgcgtcccgagacgcgtgctgaatccgcttgtccctggccgacgagcagatgtgccgcaacagcagcagcagcatccacggcctgcctacggtcagcctggtcagacgcaaggctactaccagcagccgcctccgccgacgagctacgcccagcagcaacagtttgcgcgaccggcccaccagcagccgtctcacggctcgccgggaccgccggccggcatgccctacacaaacccgcaaggcgtccagcaaatgtatcggccagcaggccagcagccatactatcctccgccacctcagtcgcagcagcagcagcagcaacaacagcaggtgaagcggcaagcaccgcaggcccgggctcctgtccagagcacgtctcggccggcagccgtcgcccagccggcattcccgacggtgcccttcctcgcgccgcagcatgtcgtcccgagcaagccggcgccgcctcgcgacccgcaccggtacacgaccatacccttatccggtccgctgccgccttacacgatccaaggccaggcgggtcagacgattcttcagcccggggcgacgtcggctgggcctctccctctctttgcgccaattgtcaacccgcgcaaccgcaacgcccaggcgtgcttcacgtcgtacgcctcgcgcctgcggacgggcgtctcgctcctcatgcagcccatcctagcgagctcgtcgacggccgccggcggcaaccaggcctcgctcagggacgcccctcagcaagggcgccggcgcggagctgtcaactacgccgagaacgacaaggaagtgacggacgactcgtcgtccgagagcgagagcgcggcggagtcggacgagtcgaaggaggagccggacggcaactttggcggccgcgtcggccggacggccgtcaagagcaaaaggattgccggtccgcccgttaagggtggcatgggcagcggcgccggtgcaaagggcagcggccttgatcgaagctacctgggcgagctcccgccggtcgagaagatcgtcgtcaagccagcgcagcggacgcggcatgcataccagtgcgtctgctcaggcgaacacccccgtctgaagcgtccctttgctgacctcatcctgcgcgcactattagtccgaccgaggccctcgacgccgctgcaaaggagaaggagacgctcatccctgtccggatcgacatcgacaccgacacgcaccggatccgggacgctttcctttggaacatccacgagtcgctctcgacgccggaagagtttgcccagatcttttgccaggacctcgagctgccggctggccagcatgcaaacgtcgtcgccgctcagatccggactcagctcgacgagtacaagggtgtggccgagatggacgtcgagtacgccggcgagcacgtgcccgtcgacgagacggctgtcatcgaggccgctgccgacgagatggcgccttccgctgctcctacgtcgacggcagcgccgtcgggtgttcaatcggctcgaggcctgaccgagacgccagcagcggccgaatcgccggcgccacccccatcgagagcgcagacgtcaccaccgcccgagggtgacaagaagcggaagcgcgagaccggcgacgaggcgacggctgaggatgcgggcgaggaggaagacgacgacgacgacatcaaggacggctcggcagacgaggcagaaccagaagaggtcgagcaggaggacgacgagaccggcatcgacgagagcgtacaggagtcggactgccgcatcatcgtcaacctcgatgtccagctgtcaaactactcgctccgcgaccgaatcgagtgggacctgtcgtcgacgctcaatccggccgcgttcgcgacgacgctctgcgccgacctcggcctgccctcgtcggccgtcccgctcctgacgcacgccgtccacgaggagctcctccggcacaagaaagactgcctcgagctcggctttgtcggcgcaggctggagtctcggccaaggcaagacgcagggcggcaaagtcgtcgggccccggccgctcgagggcgcctggcgcggctgggaggagggcagcgagtttgagcccgtcctgcgcgaggtcgacgaggaagagatggagaagcgcgaggccgaacgcgagcgaagcagcaggtgcgtcgggtctgtgcgagacggttcatcacgaaagtccactgactctatccgttcttcctctcttcgcagacggatgcggcgcgagacggcgcgctttgcgacgggcacgacgagccggcggaggcgatgaggccgggaccggccgggacatgcggtccttaattcacgacttgccagcacgcgaagaagaacaaaggggtattatatccggcgccgctgtgcccgcctcgctgcgaggggcagcggtcgctgccaggaaggggtatcgtgtcgagcgcaacgcgttcggggagccgtcgcgcggcgcggagaggagttcggcgagacactcatcgctgctggccgccgccgctggccggaccccatgtcatgctcgagtcgctcgagacggtcgagttggcgacgctctcggcgacatccgggagaccctgtgagggagggaggcgtgagcgacggagggggtcgtcagttcgagtcaaacgcgtcgcgccggcgggagtaacagtccagggacacaccgccctcatgatctccccaaacttgcctgagacggcggtagatagatccgggtcagctctcgcgctccagcctgccagctagcggccgagattgagcagaacgtaccccagagggcggcgacgctctcgacgccagcgccgacgccgaggacctcctccatccgccggttaagcccattggcatcgccgagcagctcctcaaagccctgcggcagtcgagacccaacgatcagccgtatgctagtcctagccagatgagatccccgactcacgtttgcgatctcggccacgagccgctcctgctcgcgttggaagtcggtccggccgtcgaacgcgtcggcgccgccgcctggtgtcgggttgacgttggtcgacgacgggatcacaaagggagcgagagtcgatcggcggtccatcctagaagttgctcgaggttgctgcccggctgaagatgatgggagggcgagggcaagggaggatgctgttagcgggagctgggcgagcgatcaagctgcgaggttcgtcgcagctccctccctgcctccgtaccacgacctccctgcccgcttgccctcgcctccctttgaaaacatggtcggttcctacctgtactggcagctgctcctctcgaatgctaaccatctcgtaccgtcacatccgctaccagcttctcttctcgtgcgtccagtgccgcgaggactccctcatccagctgcgagctcgtcgcaggacagctcggccattctgctgaccctcatgcgctccttcctgcttgctctctctcgacgggcatcacagtgtcttcaagacgctgaccgaccagggtgcgcacgccatcccttgcattcgcggtaagacgtagctgaccgtctcctctcgcccgctccgcagaggttacggtcgagctcaagaacgacctctgcatcactggcacgctcaagtcggtcgaccagttcctcaacatccgactcgactcgattcgcgtgctcgacctcgagcggcacccgcacatggtccgctctcgacccctgtgtgctgcttgttggatcgagagtggtgagctgacctcgttctgccgctgcgcctgctaacaggcgacggtcaagaacgccttcatccgggggagtgtcgtccgttacgtccagctgcccgggcaggcaatagacacccagctgctcgaggacgcaacgcgacgaggtgcgttgcttgggctccccgccacgtttgcgggcaacggctgacgagcgctttttggtcggcatcgacgagcagaggcgcaggccggcaagcgctgagccttgccagagaagagtctgaagccccccgccacgagatcaagcatgcacctttcctgtagcgaggccggatggggcacaggctggtcggagggcttcttgctctggacgcgccactgctaatttctctgccgactgaggacgaactgaagcgctcatcgatcctcgccgtagcaacgctcaagccactccctgctctcgctggtctcgtcggcccactcgcctcgcttcccaccaccctccgcatcggcacccgtcgcgcgtgcgagcccctccagctggcgctgctcgagccgcgaagggacgaaccaaaagagtcgccgttctggccggacgtgctccgagtggttgagcgtcggcgggaggacgcggtcggcgatcaaacgttcgatcgccccgagcgggagagtgagtggatgccggctgtccctgtcgaatggaggcgcagccgagggcgaaggtggcgggggtggaaggtcctgaggcggcggcgtcgttgaaggcgtcgagtacgaaatgagctcgtcccagcgcgacttgaggcgaaccgggatcggtcggatcgtcgcaggcgaggctgcacgcggagatggtgcgcgctgcagaggacgaggaggggagaggaggttgaggctggccgcggctcccttgggaggtgacgagggcggcgagggcgcagctgctgttgagctcggccctgtcattcgcgactcgcccgtcgccgccgccgatactgccgccgctgctgccggctggatgaactcgcctttgaccaagctgacaatctcggtccactcggtcatcgcgccgagaccgaagtcgccgcaagcgagcgccttgccgaccgggccgacgactgtgtagccgatgacggtctcgacgagctcgaggtgccgcgccgtcagcgggtgggcgaacatgtgcgaattcatcgccggaaacaggaaggtcggcgtcgtcggctcgagggcgcgaaggagggaggtctgaattcgttgatgtcagccgtcggctagggcgtcaggttacggcggcgagcgcagtgccagaacgtacagcgaggttgtcgcagaggccgccggcaattttggcgagcgtattggccgagcaaggtgcgacgaggacgacgtcggcccatcgtcggagctggcgggcagagagcaaagcatcagcagtgtcgagccaagtgagatggtggctgcttccggggcaggttcgtctgctcacctcgatgtgcagaatagggtcgccgatcttcttccagctctgcccattatccagtgcgacaatgcaagcgctcgtcagactctgactgcagtgaacgacgtagcgcacgaccgacctgccactcgtcctggtcgcgccagacgcggacggtcttgtcacgtcgcgcgccggacgcctcgacctcggctgagtcatagaaggtcaagctcggctcggtcgcaacgacctggagctggacgttggggtgctgctcggccagcaaagcagtcgactcgagtcagctggtttagatgaccgagcgagcgatggcgcaggcggcccgcacctcgagcagggcgtcggcgatgagcggcgccttgaccgaggcaacgctgccggtcgtcataagcaggacgtggacggcgccaggcacgcgggccgaggctgcgacaaactgccccggcgctgatgctgtcgctgatgctgatgctgtcgaggaggtggaggcggtcgacatgatgcgttgtgggcgttgtctagcgaggcagctcgcccttgctgagccaggccggcaggccggaggtctcgcgcgcgggcggaggatgacgagagggcgcaccgaaccaccaccaccgcccctcctcgccatgtctgtcaaagccctcgtcgataccgccatcaagaacgagtttatcatagcgtggagtaagcaaagttgcccgttttgcactcgggccaagaccctgctcggcggcctgagcctgcccgccggcaagtcggtcaaggtgttcgagtacgtcgtccccctttgctgggccagacgacctcgctcccacgccgaagctgaccgtcagctcctcgcgtcccaggcttgacacgatggagaacggagccgacatccaggcctacctcgccgacaagacgggccagcggaccgtgcccaacatcttcatcaagggccaggtccgtcgcaagcctcgacccctctgggcctggcctgcctgcgctcgccgtccctttgctgaccggctttccctcgatggtcacagcacatcggcggctcggacgacctgaccaaggccaaggcgtcgggcaagctggccgagctcatcaaggcctgaaacagatgccatccgccgagcttcctctcgcccgtgctacatgcgccccttccacccctccacctagacactagacatgtgctgccgccgtcccgcctctgtatcactttatgacgccctccaccccgagtctagtcgcaacatgtaatcttacaccctgtgtccagccacgaggacctcgcgctaccgggtcggctcgtcctggtccatcggctccggcccagcggcaggcgcacccatgccgatccgcgcaccctcgcttctcggatcgctcccgtcctcgccgacgagggccatctcgccctcgataccaggaagagggtgggcctggccgggaagggccgtcaagtcttcttgaccagcatgagcggtcgcagagagcaccgctgccggaggtagcggtgctgtgggcgctgctgctgatgtcggtggcgggagcgtcaaagccgaaggaacgtcgccagcaagggcggctgtggccggtgggaaggcacaatgcgccgcaggcgacgttgccgcgggcgacagtggcgaggacggagccggggccgacgtcacggctgcggccgatgttgatggcggcggtgcgagattaacgctggctgccggcttcgggatgagcgacggcggcagcatcggcgccgccgctaaaagctcggtcggctcggcgagggcgaccgaaggtttcgtttcctccagacctggcacagctgccgtcgagggttcctcgaccgccgtcatctccgcatccgcaatgctcgactcgacgtccgccgccgtctgctctggcttaactctctgcaccgcgccctccccggcgttcacggccgcagcaacggccgcgtcgggttcgggcggtggaggcgcgccagcgacgactggcttgggcggcagcgccatcgtcggcgcagagttattggcgtagagctcttggacatcctcctgatctgactcgtctgaaaactcctgagagcaggttcggcgggcgtttggcggtcagcgaaagcagtaggcagtggaagcagtcacgagtggcactgacttgcggcgtgctcgacttgacccacttgcggacctgaggcgatgcaatgccaagggtgagcgtcagcgggtcgagtcaagcacgctcgaaggagactgaccttgtacttcgagtcgctagggaggcctacaggtccgagcgtgacgcgacgcgagccgggacgcgatgcagtcaatgtcagacctaacgggacgccttcttgggatgcggaacgcacctgctggcgcgacccactcctgcttccagttgactgcaggcgcaacgagcgcacgctggtctggatgacgcgtccggtcggcagcagcagggaggccgggtcagtcgcaaggtcgaggggcacgtctcagggagggacgcgccgccccggctctctggccgagcaacgagtatcgcctcttgacgcggacgcacagatctcggcctcagagtgggtgacgaagcggcctccgacgcggcgtccagacatggcgagagagagaatgcaggcgatgagtgtcgagagcggtcgtcgtcgtcgtcgtcgtcgtggttaggcggcgacgtgcgctagagagggcgtcgggtcaaagcccaagccggcccccaattttgggtcggccgtttccaagcttgctgcgcgaccctcctcctgtcacgagctgccccttcgcactcgctccgacgtcatacaccgccaccgagctacattacgtagagccctccctgccttggcaccgaggcggctgactttggagcgagcgcgccatggcgcgcgagatgaaggcttacaaaagagcacgcgaggcagtcgaccgctcaaccgccatctccctcgccttcccttcacctccaacacccatctcaaacagcagcaatcagtatggacgccatcaagaacgccctcggaggagtcaccggccagcagcagggtcagcagcagggccaacagcagcagcagcagggccagagcggcggcggtttcatggaccagctccagggcatgggcaaccaggccctcggcggcggccaggccggcgagcaggtcagtcgcggcccagctaccttctctccttccctttggttgatgagctgaccgctccgcccaacttcctgccgccgagcagaaggaggactacctcgacaagggttagtccgacatcgcgtctttgccatctgtcaggctccgtccgagctgccgccgacctttctccctcctccccccaaccacctccctctctcctcaggcgttgacttcgtgcaggagcggttcatgggagccggtgaccagagtaacgagactgccgccgagcagtttaaggatgagcagatctcagacggttcgtcgctcctctctcaatcgccgtcgtgttgtcgaacgccgtgctgacagccgacccctctcgtctcgcgccctttagccatccgcggcgcctacaagacgaacgtcggctccgacttccctgtcgccgacaagtgagcgtcgcgagaccttcgcctgccgcttgccttccttcacggcctgagccgaggagagctcatggacgagcgtccggtggagctcaaggccgcactgtatttcacgaccgacagaccgatcagaatctgagcatctcgagagctggagtctgggcaggctggtgtagtgtgcgagcgatgctcttcattgacacccactgacgagcgctcgaggcgcgagcgatcgaacgctgacggcgcagcgcgcaagtcggctcctccctctgaaccatctctccccagcgacctcgctcgcacccacccaacccaccatctctttactcccctctcgcccccttcacctttttgagaccccagcgcctcaacctctccattcccagtcgggcgttacccttctcgctcgcggtcagcatggagtcgtccgacccgaccgacccgttctccttcgaggcgctcgaggtgcggccgacctcacctcgccctccagcctgctttccctctcgcttctaaagccacgcaacgagagtgcgctgacatgtgcgaccctgcctcgccaccgaccttgctgcaggcgacgtttgcacgcgagcgggccgagcgggaggccgctgagaccccacacgtcggccgagacgcgagccgtcggtcgggcccaccaccccgcgctcccttctcatcggcgccgcagcattctgagcagctcgagtcggacgacattttttactaccaggacgagggcatgcccgtcgacgcgcggggagaggcccgtggcaatcactcgcttggcactcattcgtacgcgtcgcagggtcagtctcggtcgtcggaccctctctcagcagaacgctgacatcgctcgggccgtcgctaagcgaacttcctctcgtcttcgcctattagccactcgaccttccgttcgccgtcgttcccgtcgctttcgttctcatcaacccgagcgcagccgccggtccgctcgacgttcgacgcccctccggaatcctcatcgcgctcgtttcagcccgggctctcagtcggctggcctgccagcacgagcacctctggcgcctcgcattgggctctctaccctaccggcggcgctcgggcagaccgcatgtatgcgccctcgtcgtcgcaggcgcgcctggcggccccgacgacgcacatcccggacgaggtggacgagtttgagagcgagtttggcgacggcgccgagctccgggacgtcgacgaggaccgtgagtgccctctctggtcgtcgcactggcgccgatcgaagcttgctaacttcccactgatgaacaggcatcttgagcacccgtacgtctgtcctgccgcgcgcatacagccctgtcgggaggactcacacacctttgcgatggctttgtacagagaacgtcgaggccacgacccgtctcggacgccctcaggcatcgcaggctcctgtcatccgtcggccggcgccgcaaaaggacaagctcgtgcccgtcagtgcgctacgtgcgtcgtctcaaaatttacagcctcctcgctactctgaagactgatttcgcgcccgctctctttggtagctgaccgctaccggagctttttcaagttcggcgtcttcaacgcggtccagagtcagtgttttgacacggtacgttttgcctgcttggtgacgtacgtgtttaagggctcatcttcttcccttccttggcagacaatgcacagcgacgaaaacttggtcgtctcctcgccgaccggatcgggcaaaacggtcatctttgagctggcgattatccgcctgcttgaggccggagcctacggcaaggctgtgtacctcgcgccgaccaagtcgctctgcgctgagcgggcgcgcgactggaccgccaagtttgccggcatcggcgtcaagtgtacgtcacctgacctctctcgttcgtctgacgtagagtcgactgcctgaacgtcgcaactgcaggcgccgaaatgacgagcgacacggcttggagcccgcagtcgtaccagccgctgcgcgacgcacgcgtcctaatctgcacgcccgagaaatgggactccatcacgcgctgtctgtcatcgtaccttcacccctttcttacctcgatacgcccgacatgctgacagtcgttgcgtgtggccccgacagggaagagcagcagcaaggagagcaagctcatcgacagtgtcgtgcgtccgcccctgtgctcagcctccctcgtgggcgcgcctaactcccttctcgcaggccctcctgatgatcgacgaggtccacctcctccgcgagaagcgtggctccgtccttgaggtcgtcgtcgcccgcatgaatgcgatcgacgccaacgtccgcttcgtcgcgctgtcggccacagtcccaaatatcgccgacgtcggccgctggctgcgcccgccgagctcgaacgagagcacatggcagaacgaggaggccgatatcgagcagatcccgtcggcctcagtcttcacggtccggccgtcgccagctgcactgcatcagactcaagaactgacatgctggcgacatctctcggcagtttggcgacgagtaccggccgtgcaagctcacccgcaagattgtcgcctatcccaagaaggatggcacgaacccgttcatgtttgtcaaggtacaacgctttcactcttgcctccgctcatgccgggtcaaagctgagccaattctctggcaattgtcagacgctcgagaagaagatctttgacctcctcgaggcgcacggagagggcaagccagtccttatcttctgcccaacgcgcaagattgtcgagagctgcgccgaacagttgttaaaggacgtggaacaggctggcgagcgcaaaaaccggctgccgttccggacgacgaagacgctgctcggctcgttcgccgacaagaagcttcagagtaagtcgcttcagagcaaccttctggatccccttcgtggctgacgtgacgtttttgagcgctgcagagctctccgaacgcggaattgcgttccaccatgccggcctgagcgttcgataccccttcctcctttctgatgatcaccgactctcactcatgcgactcttgggcctccagattgaggaccgccgcctcgtcgagatgtcgttcacgcagggctcgatcatggtcgtcgtctcgacctcgactttggcggtcggcgtcaacctgccggcgcacacagtcgtcgtcctcggcacgcagggctacacgagcggcgtcggcatgaccgactattctgatcttgacatcatccagatgattggccgcgccggccggccgcaggtgtgtcggcctgcagcctcgccccattgctttgcttcgctgactctgaggcacggcctgagcagttcgacaagaccggtctcgccctcatcctgacggcgcaggggcaggagcgcaaggtggtgctctgagcctggctctgcctctccgatgaagagctgacgctctcggtcgcttcagtttgacgccgtcgccggcggtacgaccgttctcgagtcgagcctgcgcgagaacctaatcgagcacctcaactcggagacggcgctcggcaccatcacggacctcgcctcggccatcggctggctgcgcaggtgcgctcaccaccgatgaccgctggagtatgctgtgctgacagagagccccgtcctcctccagctccttcttctacattcggctcctgcgcaacccggcctactacgtcaagtcgctcggcgcggcctacaaggtcaaggagggccccgcaaaggcgctcgagcgcttcgtcaaggacgctttcgcgagtctcggacaggctggcctcgtcgagcatgacgacggcgacgactcggtcctctcgaccggcctcggcgaggtcatgagcaagcgctacatccgcttcggctcgatgaagcgcatccttcggatcccggacaaggtgtctttccgcgacgtgctcgaagtcctctgcgaggccgaggagtttgaggacgtccggctccgggccgacgaaaagacgggctacaaggaaatgggccgaagcgaccgcatgcgcttcccggtcaaggagatcaagacgaccaaggacaaggtgctcgtcatcattcagatggtctgcggcggtcacgctctcgccgacatcaaggtcgatagccagccagtcatgcagagcctcaacgtcttgtgagtccggccgcccgctggtcgctggcaccagctgacgctgatcatgtcgcgcgcagccgtcacgctcctcggatcgcgcagacgatcctcgacgtcgggctcctcaaggttcgtccccaaagagtagcggcctctcgggctgcggttgacctcttctgttcgcctcgcgcaggagagtggatcgatcgtcaagcacgggctcgagctgtgcgtgcgccctttgatccaccgcactagctggctggctaaccgagagcgacccgcaggctgcgctcgatgaactcgaaggctttcgagactgccacctgcatctttcgcatccttgacaagattggcgagaaggcccttcaggtcagcaaactcgttcgctcatgaacgcgcaacgcgtgccggacgaggcctgatttccctttgtctggccaggtttttgctcagaaccgcatcacgacgtttgccgaactggcgagcgacccccggcggatcgagcggctgctcaaccgcaacccgcccttcggcactcaggtcggtcagcattgctggggcgacttggcgtgcgagacaactgacattctcgggccacttgcttagattgtcgagcaggtcaaggcgctgcccaaatttacgctcgaggtcgtcgagcacgacactcggtcgtttgacggaaccgccccggtcgaggttgacctggagatcatcgtctcagcggtcgtcggcaagcagcacaagaagaagggcggccagaacctgacaatctcgtgcctcgtcgtcacgtccgacatggtcctcatcgactttcggcgctcggccatgaagaactgtacgtccggtctgcgccccgctgggcaacagcgatgagttaatggcgtctcatttgggtttgcagtccagacgccgcagagctacgaggtgactgcagccttgacgcggccgagccaggtcgtccacgttctcatcacctgtgagcaccggcccttggtccggtcgatgctcctcgaggtcacgactgatcaaattccctctctgcaggcaacgagatcgccgggatcaacgtctttgccaattttcacgccggcgtcgacgcgagcgagtatccggcgccagacacccggcccaagggggccgatgacggaccatcagacgacgagtttgagctcttggccgacgacgccgaccttgccgccgtcgacctcgacgccgcttcgttcacagcaccgcagccgcgtgagtcgcaggcgtcattcgtcgtgctttgtgcgcttcagctgatcggacgccctatttccctcagccagtcgccaggtttcgaaggaggatgactttgtcaagctttcgaatggtcgctacgcgtacgtcaggtggctgcctaatcgccggctgcggtcactgatgttgctatctctgccagctgccatcacagctgcaaggacaaatcgtcctgcgcgcatccgtgctgtcgcgagggcctgcgcaacccacgacgtgtgagccgcgcacgctcaggaggcacggcctggactggtaacgagtcggcggtcaagacttgcggcgacaaggagacgacgccgcgcaagggcgtcaaggtccagccggcgcctcggaccgttgtcgccagcaccgagctccaggatgacgtcgaccaggtacgaatttatctctgacttcaagagtcggcatgccctctgaccgacatgccgcccgcggagcagccttcaagcgatggcggcggcggcgatgaccccttgagcgtcgtcgccctccagcggagcctcctcaagcccaaggccggcaagaaggcggcagtggtctcgaagcggccgtctgcggtggcgaccgagaagaaggcggcctcgccttcgttcgagctcttagagcggcctcaggttgccaccctctcgttcgtcctgcgcggatcgcggctcgtcgagtgactctttcactgacaaaagattgtcctgctgcgacaggtcgaacgacgacgacggcgacttcccctcggccgaccgcgcgatcgaccagacgttgtcgtccggccgggcgaagctcgcgagaatcgcttacaggtcgccatcgctgccaatcgaggtcgttgcaggccggccacggccatcgtcgacgcacgagcaacgcaagtcacagaagcgcgcccgtagcccgagcgtcgggccgaccgaccaagcaccggtcgtcgaggagtcggtggtcgacgacgcctttgacgacctgctcggtattgatcttggcagtggcgctgcgccgtcccagaccgccgccgtcgagccgctcttccacccggcttcgccgacgtcgcccgcagcagagcgcctcgccaacggcaccgacatgcgcgacggcgacgacgatctgctcgtcgatggtcagctcgacctcgaccgcttgctcaactttgaccgggcgttgccggatgaggctgcagcgtcggcaccggcccgcaagcgggcgcgacaaacgattttcccagtcgacccgacggcgagggtcggtcagcagcggcagcggctgtcgccagtagtgggtgagtgctagtcgccttggcgacaaatgctactcctcctgacgagctgagcgcttgcacccctcccggcagcgccatcggtcggatcgcccgtgttcgggctgctttcggcgggcaacggagcgagcgggcccgcgaccgctgacgacaacgacgagtcgctcgacccggcgatggacacgctccggtggatggagcagttcgttgttgactgaggagggcggctgaaggaggacaactgatggtcatggctcgtgcgtatcttgcaaggcgagttatggcgcgccagagaaaaggggcacggcggccggcgacggcccaggattgcgtcgctcagcgttggtcgtccaagactcgatggatgcactgtcgaacgctcagcaggcagaccatgtcgcagtcgctttagaccatgtcgcagtcgctttcccggctcgcgcactttgtgagagaaagaagcgatgcattacgatacagcgtggtgggggggaagtcgtaaaaggcggacgggcgggcgcgagagaaagcaaagagaaagaaactctacgttcttgacgagcgagggtttagtcgacctcctcgaccgagggtccgtcgtcgttggacgcggggggggcaccaggagcgccgccctcgggagcgcccgaggcatagagacgttgcatgatagggttggcaatctcctcgatggacttctggtggctctcgtactcctccttggacgcctcgcccgagttgtcgagccaggagatgccctcgtcgacggcagtctggagcgtcgccttgtcatcgccctgccacttgtcggcgagcttgtcgtcctggagcgagttgcgcaggttgtaggtgtacgactcgaggccgttgcgggcggtgatgcgctcagcagcctccgcgtcctcggcggcgtacttctcagcatcggcgaccatctgctcgatgtcctccttcgagagacggcccttgtcgttggtgatggtgatcttgttcgacttgccggtcgtcttgtcggcggccgagacgttgaggataccgttagcgtcgacgtcgaaggtgacctcgatctgggggacaccgcggggcgccggggggatgccagagagctcaaacctaagcagaagaaggagggtcagcagacaggcaaaggcagcacgacagaaagtagaggccactcacttgccgagaaggttgttgtccttcgtgcgcgcgcgctcgccctcgaagacctggatcaggacgccgggctggttgtcggcgtaggtcgagaagatctccgacttcttggtcgggacggtcgtgttacgcttgataagcgccgtgaagacaccgccggcggtctcgataccagtcgagagaggggcaacgtcgagcaggaggagctcctgcgtcttctcggaggtgtcgccggtgaggatggcggcctggacggcggcaccaaaagcaacggcctcgtccgggttgatcgacttgttaggctccttgcccgagaagaagtcggagacgagcttctggaccttggggatacgggtcgagccaccaacgaggacaatctcgtggacggtcgacttgtccatcttggcgtccttgaggaccttctcgacggggtccatcgtgccccggaagaggtcctggcaaagctcctcgaaacgggcgcgggtaattgaggtgtagaagtcgatgccctcgtagagcgagtcgatctcgatggtcgtctgggcggccgacgaaagggtgcgcttcgcgcgctcgcacgacgtgcgcaggcggcggagggcgcgggggttgccggtgatgtccttcttgttcttgcgcttgaactcctgaacgaagtgcgagacgagccggttgtcaaagtcctcgccgccaaggtgggtgtcaccggcggtggccttgacctcgaagatgccctcctcgatcgtgaggagcgaaacgtcgaaggttcctcctccgaggtcgaagatgaggacgttacgctcgccgatgacctaaagcgcatagcaaaagagtcagctgcctgcaaagcaaggagcgagtaaatgaagacgcaccttcttgtcgagaccgtaggcgatggcggcagcggtcggctcgttgatgatccggaggacgttgaggccggcgatgacaccggcgtccttggtagcctgacgctgcgagtcgttgaagtaggccgggacggtgacgacggcgttggtgacggtcgtgccgaggtaagcctcagccgtctccttcatcttaccgaggatcatggccgaaacctcctcgggcgagaagaccttctcctccgccttgtattggatcgagatgtagggcttgccgtccttcgagacaaccttgaagggccagtgcttcatgtcggactggacctcggcgtcggcgaacttgcggccgatgagccgcttggcgtcgaagatcgagttggtggggttcatggcctgaaagaagagagagcaagagaaggtcaggctcgaagcaacagagggcgttcggaaaagcagggaagcgctacgcacgacctggttcttggcagcatctccgatgagccgctcggtgtccgaaaaggcgacgtacgaaggcgtcgtacggttacctggaaggacaaacggcgacaaacggcgaaaagtcagcgacaaggctccaccgacgagggctgagggctgaaaagaggacgaaccctggtcgttggcgataatctcgacccggtcgttctgccaaacaccgacacacgagtaggtcgtgccgaggtcgattccaatagctgaagaagcaggcgagaagtcagcttctttctcttgtctcgagccgtcggtctcgagccgtcggaggcagggtgagggccaagggcgaagacgtaccctttccagcagcagccatctaagaagaggaagagtcggagggcgagggttcagctcgaactcgagcagagggaccaggcagaagagcacgcactttaaatgtctttttggggggttgttggggtttttcgccttctaagttgcgctcccttcctctgcttccgtctcctcccctcgtctaactctcaaactcctcgcctcccgtccatagacccgcctttgtcattgcatgcccgttacaccctaaccctcgtcgtaactccaaggcttagcgacactgaccgacgttctgttgcggagaatgacggccgccgcggccgcgcggaggctaaggctgaaacgtccaagtctgaagctcgcgcgcagccgccgctaggtgaccctcacccctccatacctcgatgggaatgcacccatgattcagtctcacagggtgggttgcggctgatctcctttcaattcagtacaaatcacgacgggccgagatccgcgccattgtccgctgcagccatcgaccccccgccaacgccggagggactggcggcggcagatcgaggcaggagtcgcagtagatggaggcgagccgatactggcaggtgagcgtaccggttcggctggcaaccgtcgatgtgggcaagttaaccgttcgctaggcgggattggggtcgtaggcggaaccaaaacgcgtgtgcgatggccgcctttagcgagcccgccgcgatcgaggggttacgcgacgtcgccatggatacgaccgacgcccagctgagcactctggtcgtcccccttgcatctctcgctctctctctctttctcaaccctgagcagctagatacgacagccggaggcgctagagcctagacttaaagaaatcctgctggtctccatgcacatcgtcgcgccccccagtaaaggagaggaagagaccgcttccgttcgtggccgtggttggcgcagtgccctccagcctcagccccgctcagacgggcctgtgcccactaatcccttacgccttgtatgtagaaagagggtccggtgagacgagtcaacaggcagctgacgaacgtcccttgccctgggacaaccatctcgctcgccctcgccacgtcacagccagccagcctaaccagcagcccgacacactgccactaggacctgattccactggtcgcataactggagcggtctctgcttggctccgacacccttcgtgagtgaatcagctcgttggacgatcttcagctcacggctgacgcctcctggcgctgcctttacatcgcagactcctccgctgtactttacccccttagagctcttcgccgatcaggccaatgcctcgactaaaaaaaaaaggtgctgagcccatcccagcctcagcgtatctctgttcgtctgctcgtgcgcgacccctggccgccgccttgcctttaattgacccttcattccgcaccctcttcgttccagcccttgatccagccgtgcctctgggtgggcggccgcttttcgaatgcgtctctcctctcgactttctgccgcatcccctacccagtatgttggcgcgacagtcgagagaacgccgagcttaagggatgggcgggtccggccgaccccagcgccgagcctctcctcacgctccagctgactatcatctcaccccctttgatcgtctgcacttctctcccgaccacaagttcgtgctttcctctcgttccgttcagctcggtgccgccgcctcgagggatcaccctcaccggtcgccctccgtgagccgcaagcagtgcgttccccccttccatctggcagcttcctttcgccggctgacgcccgtgcgctgaaccggcccgtagtttgttcgctgaatggcatgaaggtgcgttgaggtcctggccgtttgcgactcaagctcgaagctgacccgactgcccttcttgacgcggcgtgcacaacccggtttcgccgtctgtgcaagctcaggcgactcgtcgttgatgatggcctgctcatgtgttcttcctcgcaccgcgtccaccgtcggtccttttgttcatgacttaggcgctgatcaccgggctttttgtctgctcaggctcggcgcaaccacagctatgcctggcagcgcgttcatacttgaggtcgacgccctcggagtcggacgctggtcggcagtctagcctcgggattgggcaacgctgttcatcgtgtcgcctctcgctcgtacgtctcgcttgcaaatcgcctgcgcgacccgttttagctgtactgatgcgtctttgtgtctcattttgcagaagccgattcccgcctgccttgttcacgacgcttctccggcttcttcccaagcggatgctttgacgaccttactcggccagctggttcgccgctgcccccgtcctgcttcggccgcagcctacgtttccggcaggaagcaagccttgttgtgcgcactctgctgcgaacgcttgtctcgacccatctttggctctcttgctgctgacgcacaagcgacgcactcacgccttggtcaaggtgtccaacagcagccagcgcaagaggagcatctcgggatggtcctacggccatgctgtgctccgctgacgaggcgccccttctcgccgtatgaatcccacccacacctctagccgtcgcacctgccctgtagcccgcccccgggcctgccaatccactcgctgactccaaaacagaagttgctattgatgagagccatgtgagacaaagaaacccggtgggggatgggagatagacaggtgctggatggggtgagggggaatcaaagcggacggagagccgagcccgaatgggctgaggccggagggataggacaagatacagggaagagacgacggtctaattcgacatgccgtagcgctcgccagccttgcgggccatgatgtccttggtcgggccgagcagccgggtaaaggccttctcgcccagcgcagcgagcttgagcttgccgccgaccgccttgacggtcgctgcccgcggggcgcggttgatgagcgcaagctcgccaaagtagtcgcccttgccgtacttggcgacgacgacgtcctcgacctcgccgccggcagagcggatcgactttgtaaactcagccgtgccagattcgatgatgtagaactcctcgccgatgtcgccctcgcggatgacctcctcgttcggcgcgtacgtccgcgtctcgagcgcgtcggcaatctgcagcgaggcaccaaattattagcaccagagagcagagaccagtccgtcgagaggggcggccgcacctttgctcgctcgtatggctcgagtcccgagaggatcgggatcgaggcgaggaacgtctcgtacatcttgcgcttggacgaggtgtggtcgagcaggatcgtccggaacgtgacgcggtcaagcgcccagaggaccgccggcgcgacggcaacgatcgaggccgcccgaggagcgctgccgagcgcgcaaagaagggcgtcagtcagcctggctcttccgagccgcaaccctccaagagggcacgcacttgtacatgagcgcgagctcgccgaacgacatgcccggcccggttgtcgcaaccttgtcgccgagaccgccgttggccgcgctgccctcgccgtccttactcttgaagacctcgagctggccctcctcgacgacgtagaagtagtcgccgacgtcgccctgacggattacgacctcaccctggccgacgcggacctccttcatggccgataggacgtcagacgactggtcgtcgtcgaggttgcggaagaggaagttgctcgcgatcgaaagccggatccgggccagctgctgaggcgactttgggtatgtcggcagctcaggccgctgggcgccgccgccggcaccgtccgccgcgccagccttggggtggagcgactcggccgagacagacgtccgccggccggccgagaagcctggcgggaagagcgagctcgacggcgctgccggcgggaaggttgtcgacgaggcggatgcagccgagccgtttgacggcgcgagcggtctcacctcgtcgtcgtcgtcgtcgtcgccatcgcgtccctcaccgctcggtccctcgtcctctccgacgacgtccatcgcaccgccgaccgagaacggaccagaggtaaagagcgagttggcggcggccgtgttgagggccgacgacccgcgccggccctgcgagctcggggccggagctgacaggcccgacgacggctgctgctgctgctgctggaatggcgacgactgcgagccgaaggacgggccagactgggacgagatggacgcggtgcgctgcgagagaaagacgtcaaggaccatcagcgcgatggccaagtcgggcgggaagctcgcagaagcatgctagcttcgctgaccggaagcgggcgacggacctgatcctggagccgggcggaggcccagttgaagatgacctgaagcgtgtcggtcgagtgactcgactcgacgtgggtaatgagctgctggagaacggggttgggcgccatcctgctgcgagaagaaggaagagaaggaggtgatggtgagaggaggaggagatggctgctggtcgagacctcgcttgcgcctgagtctcagatgccgcggaggccggggcacaaccctggacttggggtcactgggcgattctgcgtcccggggcgcgtctcgccggcctcgagctgcgccaacctcgaccttcccgacacacttgcccaaaccacttggcctcaagcactctcccgaggtctgctctcagggcagaagatggccgacgtctcagagagccatcatccgccgccaccgtcgctaccgccggtggaggtcggagccggcggccggccctctcctccgccttctccgccaaccgatatcgtcgccggtcctggcccgcgctctcaggctttccatgactcgctcctgccaagccagacggcctcgtttgagctggtcgagggtgacgtgacgatgcagtcgtccattgtgaccgacctcgccagcctacgagccgatgggccggccgagctgccgccgccagccggcgcggtcgaccgcgacggcaacccgtcaaccgagccaatctcggcctacttcaagcttgactttgacagcttctcgtactacatccagacgctcaaggtcgtcatcggtcgccgggtcgtcgtgcgtccacctttgtcgcactcagatcgaaccctgccgtctcagcgacgcgcccgtggccggcgagctcggtcggcggcgcgtcgcttcgaccttcgcgtccctctcgcgagccacccggccgctctgcctctcgtcgcaggactttgacaactgaccatgacgactttccaatggccttactctcgcgcatctcgctgccgaaccctcaggccgcccaaaccgaaccgagaccagccgtcaagccggagccgttcgacggcggctcgtccctcccgtcacctagcctctcatccgcagctcctgcaacgaccccgcccccaatgctgccttcccaaggcgtcgacgtcgacctcggcgcgctcaagtcggtcagccggcatcatgcccggatcgccttccggccagaggagggcgcgttcgtgctcgaggtgctcgggcggaacggctgctgggtcgacgatcagtactttgcaaagggcagccaggtcctgctctcgccgaggtcagtccgttctgtcgatggtagagtcatggacgagccttgcgaaccgctcgacgctggaggtcggctgctgcatctcgctcgcctgcctgctgcgccccgtgttcgccgcccagccggtgtccgcccttcctcacaacggctgacacgcctggacttgcaccgtgtctcacaccaggaccaagattcagatctcaatccggaccttttactttgtcctgccgccctcgccctcttcagccccttcgtcgccgtcctcacagcgaacgcggactcactcgctcggcggccggacgggttccttcggcgaatcgttctctgctcactcgcactcgggctccagtctgagtgaggagagcgacagcggtcttccactcatcccgggcctcggtggcgctggcaagtcagccctcgccgtcgctggtgtcaagcagcaccggaagaagaagaagaaggccgggctcggggacgacaacgaggacgatggctcgggccgcaagtttcgcctcaaagtcatgctgccggtcccgaagctacccaagtcacctccgccgccgagcagcgccggccgaggcaagggcaagggcgccgcggtcggacccgcggtcgccgggggcggaaagggcaagggcaaaatggccctcggccctcatgccgccggcacgggtggagggaagagccgcgggatgggtaagggcaaaggtggtggcaaaagcgcctcgctcgcatcagccccggtcccagtgttcttcccgccggctcgtgagccagaggaggcgaaggatccggccgccgcactcggcgaggacggccggccgattgcgccgcccaagaagaagaagaagaagccggtcgagggcgaggccagcgaggcggccgccgatgagggcgatccggtcgacaagccaaagccgaagcgggtccgcaaaaagaaggcgcctgttccgtcagaggagggcgctggcggatcgctctcgctgtcggctggcttagctgatccctcagggacgagtcctctgcccgcggccgctttgacgtcgatcgacagcaagccaagcggcgaagccagcgcctcgctgtcaaacactctctcgctgccggtcaagaaagagtcggatatgaccggctcgccgtcagagccgaaaccgactccctccccgacgccgagtacgaacccgcctttgccggccggtccagcagcactcgcagcaatcctcgcctcgaggacaatgcaggcagcagcagcagcggcggcagcgaacccaacaccggcagctccgggtgcgctagcgccttcgcggttgacctctttcgatcacctttgtctgacgagtttctcctcgcagcacctcgtccgcccgtctcgagctcagggggcaacagccagcgtccgcccagcggtcctgtcgcgagtgcctccaaagcgccagcgagcggcgtcgccccgattgctggaacctcatcgacgcccgcggcggccgagaacctcgggtcatcggcaccggcacccccgcctagcggcccatcccctgccccaccgccgccgcccaagccgccggtccagaacgccttcaagctgagtttgccgaatcgcacctcgcctgcgtcctcgccaaagccagcgccgaagccgctctcgggcggaagctctgccaacggccttcacggcgcggcaaacgctggtgcggcaggagcaaaaccgcctcatagcgggccaacgccgggtatggcaccctctgctggtcctggcgtcggtcaggcgcgtccgcctcagccgtcgccggcgcaacgacctccgccgcaggcgcagcagcggccgccgctgccaacaggcccagtcaacgtcacgcagcctcgaccttcattgccgccgcagtcaacggggccttcaccagccgcgtcgctttcgctgccagcccagcggccgccaaatcttcagccgccaaggccaaaccctcagacaatggccggcgggctgccgacgcagcgagcctgtccacccacgcagtcgtcaaatacgccctcgctgtcgatcccagccggccggcagcctggccagccccagcaaggcgtcgcctcttccgcttcgcctcggcatccgccagctcggcctctgcagcagtcgaggcctccgacagcctcgccatcccagtcgacgcagcggccaccgcagctacctttgcagaaccaggtccggccacaggcacctgccccccggcctccaggcccgctgcagcctcctctacaacaacggccgcctgcgccgcttagccagcagcagacctatggcgctccgctatcgcaagggccgtccgcacgtccgcccggtcaagccatcggctcggccgggcccctggcaggtcctttgcagggtgtccggccctacgcgcagcagcctgcggctcgccccttgtacgccgccaacgcggctccccagccgcgtcctctctcgatctcgcaacagagtgagccaggtctggctcggcctgctcagcggccgccgcctcccaccgctccgcagaggcccccttcaactcagcagagtcctccgtcgtacccctcgccgtcgatgcaggcgcggccggtacagatgcagtcgcttcagcgtccgcctccatcgcgtcctccgtcgctgtcgccgggtcaaccgcagccgttgcggccgccgacgccggatccgcagcaagctgctcgcccgccggtgcagcctgttcagcagcgcccgccgccgccgcagcagcagcaggcccgtccgccgccaggcccagggacgcccgcgaatggttttcggccgcttgctcgcccgcttgcttcagcgtcgccgcctccaggtgtcggccagcccgttcgccctcagcagccgtaccggccggctcgacctccgagcaaccggctgtctgcctcctcgacgatcctcgcgaccaagcagaacgcgatcgccggtacgtcgcggccgagcaacctgccgctttcatcggccgacatcctcaagtcggccaagaagctcggctacgcgacgaccgacgccaaagggaccgccttccggccacccccagtctatcggcctccgcctccgagtcggccaccgccgccgtcacctctgcagacgaatcgacctccgctaccgaagcccatcggccgtccgcctgtcgcccgacctacgccaggaccggtgccgccccctcggccttcgaccgcgtcgccccagcctccgggcgtgctctcgcctaatgccatggcggcgacgattccgtccagcgcgccgctccggatctcgattgagccgatcccggcccatatcaacacgccgccgccgtcgtcgctcttgaccgagccgccgatggtcatgcatgagggcaccttgatcctctcgcccgagatcttttcccatctcgaccagagccagatcgaccatctccagtcgctcggcgtcgcgcaggcggtccgcatcctccagacttacatcgtcggcttcctcaaggagaagatgaaggccaagggaatcgagccaaacagccagggcacgacgcctccgcctcctctgtcgacgacgcccgcagccgtcacgagagcgctgattgctgcgcctccgcgtccggtcgggcgaccaccggcaaacggcagcggtcgcccgccctcggccgtcaacggcgtgcgaccgccgcctgtccgtccagtcgcccgcccgcccactcaggcgcgccctcctccggtcatggcctcctctgcgccgatagccgctcgcccagccgcaccgggacgcccgccgacacctttattgtcgacgcagagccctacgccggccgcgacaacagcggcgagcggcatacctgcgaacccattagcggcgctgtcgctcctggcaaccgatgccgccgcgggcatgcgagctctcggaccgcatgcgaatgcgctccttgcatacctgaacgtagtcggcgccggcgcggacatggccgtcgcgactcggatcattctgacgggcaaggccgaggtcgctccagggacggcggtcgcacgcccgcctgctccggctgcaccaccgccgccgccgccatctcagcccatggcctctgcaccggcgccgacgtacgtgcctgctccgccaccagttcgaccgcctccggccaagcctgtgacagccaccccggcgccggcactgaagccgaagcccaagccgcggccgaaaccgaaaccccggctggcggctccgccgcctgcgcccgcgccggagccaggggttgtccaagagagctatgtggccacgatggacgacctggcggcactgatggcctccgacatggtcaacgagaccttctcgatggacggcggcggtgaggcggccctcggcgacaagcgcaaggtcgacgaggcggacgaagacgaggcgagcagcaagcgggccaggcactgagacgccgctacccccatggcatgacatctacgaccttctgactgtccgctgtgtacggtcgctcgggaaacccccctcagacgtgcgcgccgtcgaaagtccatcctgtacaagcatgccattcgagtcttccttgcttccgccgcaattctccaccagtgatcgcccgagggcgctttttttagacgatgccgagcagacgccggcaacctagattggcctgagggaaagcttagcgacgctcctcgacgctcttcttgctcttctcgtccgagacgcgcgtgcgctcgacgatgccagcctgctcgcgcgcgatccggtcgagccgggggacgacaatttgctccgagccgaaggcttgggcgatctcctcaagcgtgaatgagtgcgtctcgaccatgtctgagggcaagcgggaaggggacaacgtcagtcttcggtcgcagtctgtcgcgatttggacgcgccaacgcacagcggtaggcgagcagccactggatgacgacgagaggcatgtacacggcgtagtacttgtagcctgtgagggagcgcggtcggccagtcagtcttcgtgctcaaacagcgcgcaggaaggacgcaccaatcttgtcgagggcgatcgagtcgacgtaggtgcagtagacgccgaggcactggttggccgtgttccagacgagcaagcctttgctccggagcgagtacgtctggatctcggcggggtctggagacaggtggttgggtggtcaggcgagttgcgacgcctcaaagcaagacggcacggtggaaccgcacaagagtagaggacggggtcttcggttgagaagggagtgggtcagtatttgtttctccaggaagagaggtcgagagggagcgacgcactggcaaagttgaagaagccgaggtagatccagacgagggcaacgctgtggaacgcgagactcgaccgtcagcaaaaaagtcaaagacagcgagagttgcgaagaggtaacgcacgctccaatgccggccgaggtgttgccgctcgcagagttcgcaaagacgccgctggttggagcgatcgcagtgggcgtcagccggtgcccgaggccgctgggcagctcgtgcgcacctggtcgcgcaaaggccggcgagcgagacgagcaggagcggccagatccagagcaggatcgttttcttgccgacgcgcttgccgacaaagacggccgcaatctggatgatccaggtccacatcgagaggccggcgccgatgcccgtctggacggtcgtgtcggtgatgccgacgaggtcgaggataaccgtgtagtagtagtagatgatgctcgagccagacatctgcgaggcaagaagatcagcgcaggctgagattcgagaggaggtggcgctagggtcggacgcaccgaggtcataaaggtcataagcgcggcgagcgcgagccggtgcaggctgctcttgtccttgacgatgttgcgccacttggccgacttggcctccttctcgagcgcaagcgcggccttgacctcttcgaactcgaacaggaccagcgggtcctcgcggtcgccgttgccgtggtattcgacaaagaagtcaaaggcctcggattcgcgaccgttggccatcagaaagcgtggcgtctcgggcacaaactggatgccaacgaggatctgcaaaggaaagggggccccttgtcagcgacttcactttttagcttcgctcatgctgcagacgcacatagacggccatcgggacctggatgaggtaagggatccgccaggaccacgaggttgggatgtaggccgtgccaaagacggtccacgaggcgatgacggagccgaggatatagtacgagtcctaggtggagaggggacgcaaataagtcagaaagaggagagcggtagcgggccggcgagaacagggcgcacccaagaggcggccatcgtcgcgcgggtccgcgggtgggtgatctcctggacgacgatgagcgacgtcatgaggaacgaggccatcccaaagccgatgatcacacgaccggcaacaaagagggcatagccgttgacgccaggcaggccagcgacgcagccgaggacggtgccgatgagcatcgtgatcgcgtagactgaagagtgtcaggagtaaggcaggtcagccaaggcgccaccctggtccagacgattgaagcgtgaacgcacagcggatgccccagcgccggccaaacgtgtcgtcgacgtagttgatgagcgggccggcaatgatgcccgacatgaagcccgaggcattgaggagaccgatcgcgggcaagctcgggtcgccaagatcgacgtaccaaacgtcgagagcctggagccgcgagatgatcgtgccctggatggggagagagagaggacgacgtcagcttgcggccaggcaagacaaacgaggcggaagacacacgtcgtagccattgaggaccatgccgcagaagatgatcgacaggaagctgaggcagaaggtgagagagcgtgagcgggcgggcagacaacgtgttgatcgaaggaagggagaacagacaagttgagcttgagggcgcccttgttcttgtgccagggcacatggtccgacgcattggggatcgtccgccagtcgatgctgtcggtgtctgcagagccagtaagcgaagacatggcaatggtcgtcagcgacagagaggaagagaaggaatgtcgctttggacggaccgttcgagtgactgctccatgcggtgcccggttaggagacgtcagccgggagccgggcgacagatggagggcgggggttttaagacggccaaggccccgccgaccccgtgtgagatgagagagcggcgcccggcgaagcgcacagcacgcagtcgaggagaaggagaacgtcccgacgcagtcgagacgaagatgaagggagaagggaagggaagggagactagcagcggacgcacctcatctgaagcgggaacgggcggcgttggcccgaaaagggtttgtcgacctggctatcagcaagggagaacgggcagaggtgcagactcgcgacgcaggcatgatcctggaaccgctttttgaccgtctcccgacctgtgatatgtcgggatctcagtcctccgagccgggcaccctcgtccgaggggccggcctggtacaaggacaccggtgctgcaactgtgcgtcctgcgacgtgctgtgggttcggaaggaggagcggcgcgagctggggaacaggacggcgacagacatcggatggcgaatgcttgagggtgtgtagggtaaggagggagggaggtcgttggcggtcgggaggcaaggtcacggtcggagggagcaaaagagagaagaggcggacctccgtatggggccgatgaggccgagccggagctgctgccgctcgagcggccaacgtccgcctcgcctagtctggcccagtcacgatcaacagctgatgagtctgcgtgcacaacccggtgatcatcatcctatcgctaccaggtcggccacagcgctgaagtgtaaggagggcatgtcagcccgcccgatccgagctcgtcgctgcgcagcgcatcccgaagccgatcctccgctcagacgctgacgccaagccagacctcaaccggctgacctccttgagactagggcatgggaagaggagcggggccaagcgaggagttcgacgagaacgacatccagtgctcacttggtttcccaagcaagctgagctgacggacgatcgtgaagcgcgccgcaagcagcagctcgacatcggccgagacgacgacgtcggtcagcacgaaagcaggccgacccctcccctgcgacttctgccgcccggccgcattcatcagcacgtagagagctccgccccaagcgcgaaggcgacttgtgggaacgaactccttgcctgtcactactgctatacttgaccttggcataaaagcgtccgccagctcggccatcggctttgcggcgcttcgcagcggcctctcgaaacaggtcgactgcccctcggccctcggccgaacgaccgcttactgcatcagcagtagtattagtgcctgtcctgcgggcgtcggatcccccaagggcgacggagctcggtcttcggccccttggcaagtagacgatgaggacgcgtcgtcaccgagcctcagagcggccggatcctacaagagggcttgcagtccacgctcctcatccttttcctcatcaccatctaggctcctcttcatctcttacactctcaactaccgccatgcccgcctacaaaaacatcaccctcctcggcgtgcgtgccgtctcgtctgctttggctttcggggggggctacctgcgcctgctgcgcctgctctcactgacagcctgtccctcgccgtgtgctcgcaggcctccggcaacgtcggccgaccgatccttaaagccctgctcgctgccggccagttcaacgtgaccgtcctctcccgcgccgagtcgcaagcggcctttccctccggcgccaatgtcgtcaagaccgacttctcggctgagtcggtcgtcgacgccttccgcggccaggacgctgtcgtctcggccattccgtcgcacgtcggcgccgaacagatcaagctgatcgatgcggctcttaaggccggcgtcaagcggtttatcgcgagtgacgtgcgtcgtttcgctctgcgcagagctcgccatctggtcctgacacactacaacttgctccagtttggatccgacgtcgagaacccgaattgcgtcgaagccgtcccctttttccagggcaaggttcagattgtcgactacctccgttcaaaggaggccgagggcctgagctggtcaagcgtcatcaacggcgccttcacagaatacgtgcgtggttgctctcgccactcatgcatgaccctagtcgctgattctgcctactcttctgtctacagggccttgagggaggcgcgctcggctttgatctaaagaaacacaaggcaacaatctacgactcgggcgacgccaaggcctcaacgacgacctacgtacgtccgccgcggaacagcttcgcgcaacactacctctcaatttgacagctgatcactttctaccgcgccggccgcaggccaacgtcggccgctcaatcgtcggcatcctccgcaagcccgatgagacggccaaccgctacgtccacattgcctcgtttgtctacacgcagaacgagcttctggcggtgctcgaaaaggtctctggcaagaagtttgccgtcgagcactcgacggccaagcagatgcagtccgagggcctcgaggcactcaagacgttctccatgcccgacgtcctcaagctgctcgtctacggcttgtatggcgagggcaacggcggcgactatgcgctcaccaagaacgactcggagctgctcggcctcgagaaggaggacctcgagacggtcgtccggcgcatttacgaggcccagaagcagtagcttcgggaagtttggctgcctttccttgacccgcctctcgcccttgtagaccacctgccccttattgctgctcgctgcttgtactgtatcgcatcgcatctgcccctatcttctgttagccgaccttccggatagatcgggctagcgagaggcgcaggagtcatgggcttttacgacagacattgatcgttgcgtctcacaatgcgtcaccgaggcgctcacctccgagcagcctcccagtgctacccccctctccagcggcgccgacgagcggctgccttccgcggctcttggcgatcccgagcgcgccctcgaagcgacccatgatgtgccggaagcagtccatttccgtctggacgtcaatcatatcctcctcttcgtaatcgctggcacaccagccgacgacgccggctttgaagtagcctgatgtgtgcgattccagagtctctgcggcagggcgcaagctcacgacaaacgacgtctgggccaaagtgcctcgagcgaaagcagaagactgccattcaaatcgtgtcccgcttcctcagctcatcgtcgaatcccgcgcgagatacctcgccagcgcgagccggacgacatcgaggcttttccggacctcgtgccacctcacctcgtcatcctcttgcttgccctcgcgctccttgtccgtagtcggcttgccgctgctgctgccgatcgaggatgacttgcggagatttgcgaggtggccgaggtaggtcttgggctcgtcggtcgattgcgagaggaggtcttcgagctggccgaggaggacgaaggccgtctcggtcgggatgagcatgtcggcgtcttggcaacgtggggcagcgggcgagcgcgggccagtcagcctgggggtcgttcaggcgctgaaaaccgaatggcagcagcaacgcaccgtccaagagcgggacgaggtcgaccatcaagaccgcccagaagctcctcggcgccaacccctcgctgaccgcctggcacagcacgccggctgccgccttgcggtcgcccgccgcataggccgcgaggaaggcgcggtagcgcgggaggaaaatgagggccggggcgctggcggccgagagtggcgagagggggtcgacgagcgagggcgggatcgactcgacatgggcgatgaactcctcaggtcctgggatgcgtagaagagggggggggaagtcagctcccggcgctctcgcctcgccctcaaggcgcatcagcgcactgaccattctggacgtaagagccgagcaccttgtccgcgacgtcctcgagccgagccacatcgcccgcccgaactgcaaaggccgtcgcgagcccaaattgccgctcggccgcgagccggccggcgacggtccgggcgagctggcgcgcacggtcgtcgagcccgtgggcgtaaagcctggcggtgagcatcggacggaaggaacaggccgtcagtttcgtccaacaggtgttatgaccgaaagagagagagagaggaggaaccgacagccttatgacctcttcggccttctcgatgtccacagccggttcctcctccccctcctcctcttcgccgccctcttccagctcccgatcgagcccgactgccgtaagcagcgcgccgaccgtctcgcttcccctttgcccacggacgctcgccgcatactcggccgcgacctgccagagcgccgggtccgccgccaaatgcccgacatacgcaagcacgtagtgatccctgaggccagggcctcccgtcgttgttgagggagggacaagcccgacgtgctcgaggaggtcgacaaagtgcgcggcgagccacggcagccggccgtcgaccgcgagcgcggcagcgcctaccgggtcgccccggacgagcgcgagctggagcttattcgcctgccgttcgtcctcgtcctcggcgtcgccgtcgtcgtctccgtcaacgtcagcgagcgcaggcagccgctcgagcacgcgctcgacaacctccggcaaatcgtccctcttcaagcccggccggacccagagcccccacgcgccaagcgcctccctccaatcgaccgattcctccagcacgcgccgctcgtcgcccgcaaggagcgcgagaagcgctccgacgttctcctcgagctcggccgcctcgccttcgtcaagctcgggctcgccgtcgaccgcctcgcgcgcccatccggagccgccctcgagcggcctcgcaagcaagcggagactcgcccgccagcccgtctgcgcagcgacaaaggcccgctcggtcccaaacgccgtgctccgcgggtaggccccgatcagctcggccaggcgaggcgcgagctcgttgacggcccttgaccgatggccctcgagcgcgcggacgagctggcccgcactggcaaggaagcccctcagcaagctccggagcaagtagctccagtagccctcctcgcgccagacctctccgccatgcgggccagagaagagccggtcgccttcttcttccgtcgggccacagtcggcagagttgagccagtggaggagctcctcgccgacgacgcctgcgccgaggccgtcgcgcgggaggtagaggaccgcgaggagggcgagcgacgtccgtgcgctggcccaggcggagagggccgccggcggcggcggcggcgggagcgctgctgacgaggacgggccggaggaaggggcgccctcggcgtcggcgtcggtctcggccggcgagccggcaagcagcagctcgtgctggatcgcatcgacgtagagcgcacagacgcgggaatagttgctgacctgctcggctgagggcaggctggcggaggcggcggccaggaaggaacgcagaacgcgggtcagtcagttagtctctggatgccgctgggggccggagacgcgtctttcaaggctggcggacgcgagctccgtcaaccgccagctcgcccgaccagcgtgtatagacgcccagcagcgagaagaggagaggagaaagagagacccacgccctctggccctggccgccgctcgtctccgactgtgcggcgattcgctggagcgactggaagatggtatagctcctcgtgtagagctagcgcggggcgagaagagcagcacggcggagtcagcccagcctcggctctgagagaggtcagagttaaaggcggcagcacgcacagggacgacatagtccggcacgctatcccatcgaacgacaaacgcctgcctctcgcgcggctcaactccctgctgcttgcctcctcctcctccagccttggccgccgtgctcccgagggcgagctccggccccgtcggacacagcgcgtgcgtgagcgagcgggaggcttgccaggtcgcgcgctggccggaggcgatcgggccgggcgagagggcgagagtgggaggagttggggcgggcgacatgctggatggggttgagggctgagggagggaggagagagagaaggctcaggcaggcggacggaggggtcagggttagggttagggcggcggcgcgcagcagccaacgtcgttgtccctcctctcgtcccttgcttctcccggccggaccgggacaagccaggcgaccgcgagggaggcaaaagacggacgatgattgttgccatccaacagccatgacgatacgcccgacggacgcccagcggcacgccctccttcaagagcagcagcacccagagtcttacctgtcgacggcgcaccctcagcccggcagttcggccgccgtcgctcgctcctctatcgtatcctctccagcagcagccgctacccgtcgatctccatctcttgcctcccttcctttcgccattttcaatcgcatccgctcgcaccttccgctctctctcccccgctcctcttcctcttcctctgccctgttctcctcctccccttcgcccgcttaccccggactagccgccctcgagccccacctcgccctcgcccaaacgtgtcatgccttctggcgctggtacgccgcggaccggggcaagtggtgggtcgacgccctccacgaggtcggttacggcgtgcgtcggggatgatttgacactccctcctgctttctcttcttctgcttggctgattctgatctaccgcttgcttgcaaccgttcttccttctcgccgccgctcattcgtctttgcccgcacggatgtagttcccctccccccgaccctcaacgaccccgctcgtcgtcgctcacctccaccacctgctccaccactcccgcatttgccgagccgaggtgctccgaccctggctttgggcgcaagacgagccgaccgctgacgctgcgggcagttacgacgagggggagcgagcggagggcgacttgctgctggccttagaggacgcctttgtcgagcggcggcagtcttcaacagcagggagcagcagctcgcgacgacacacacccaaagagtcccctggccgctcctcgttagcccctcgccgtcctcgcgcggtgcccctgccgccagcgagcaagaaacgcaaagcgcccgtcgccgacttgaggggcgagcgcgtccgatgctgtgcgttgcctttggaaggcgggctctggcgtgcgtccctttcattcccccttttgcgcgctgcagacgcccccgacccggaccccgccatgaccttcgaggtctacgaaaggtcgttcgagcagaatgaggagctgggcttgaacgatatggttgtggaggggtatgagggcgagcaggaggcgaaggaggcgagcgaggcggccgatcgggcggcggcagcggcggctgccgaggagaagaaggcatagagccgactggccccaaaagaaaagaaaagtgtcttctctcctctagatggcgcatgatcttctgggtgctcggttgtgtcgcgaaagtgcaagggggtcgacgaggacgtagccagatggcttgcgcagcgacttcggcgttcgccgaagcgtgaagcgcccgatctcgggctcgacgaccgtcccagcaaccccctctccctcacctcttacctagcagccgtaccatgtcctcgatcgtagctcctgatccctcccgctccgcaccgccgccctacctcttccacccgccagcagacggccgcttccccgtcccccagccatcaggctcgttctggctcgaagggggtgtcaagaacgaccctctgcttgcgtaccggaccgcaggcgggctgcccgacgcggcggacgtggtcgtcattgggagcggggtccgtctcttcatctcgccatccgttatgctagctcgggctgaaccccccttgaatgacttggctctgtcgacgacggcggcggcggcaagcgcagctgtcaggcgcgctcgtcgcgtacgagctgctgtttgctccaaccccgcctaggtcggtcgtcctgcttgaggcgagagagacatgctcaggcgctacaggccggtgagtccccatcggatgtcactctgacagcttctcgctctcgtgacgacaggctgaccccccccccccgggcgtgcggcagcaacgccggccactgccgaccagcaacaagcagcgccttccacaagtatgcccggctcttcggggccgagatggcgctcgcgatcctccgcaacgagcaggcgacgctcgacgctctcgtcgcatttgtcgagcgagaggcggtcgagtgcgagctgtggacgggcgaaagcttcgaggtggcgatgagtcaaggtacgtctcgccatccacccaaagtcgtctatcactatcgctcggctgaagccgttgtgtgctttgatagaagtcaaggagggccagctcgcctcgctcgaggcgtacagagccgccggcgggccaacggcgcacatcaccgtcatcaccgacccgaccgaggcagccaaggcccgtttctccaccctacggcccccttcactcgactcgcgctcacgcttacgctgactcacgcctccagatctcgcgcctcaaatcggcccagtcaatcctctcctggcaggccgcgacgctctacccctggaagctcgttgcccatctcgtccgcaagtcgctcgggcgcggcctcaacttgcagacaaacactcgagtcgagggtgtcactctggccaacagcgagcaaggtatctggtcggtcaacacgccgagaggagctatcgtgcgtcctgctagtgctcggcgggcatcgcactcgttgccgacttggcctgctgactcttgccggctcgactcgatagcgcacacgcaacgtcgtccacgcgaccaacgcctttgcgccgacgctcctccctctgctcagcgacgacctcattgcagcctcggccttcccctgcaacaaggtcgtcccgccgctatccttctccggccctcgagcgctggcaaactcgtatggcatcctgatgcctggcggtacgtcttactcgattaacccccgggtcggctcagacgactgcctgctcttcggtggcaacaacccggcaatcaaagaccttacgcagctctttgtcgaccaccccgtgctcgagtcggacgatcgcattgctggctttaggccggtcacgcaggcggtcaaggagctcgccgagaacgagttcgaaagctggggagccattgacgagacggctgtgtcgtctgactggacggggatcattggtctgtcctccctacagctcatcgggcaggtcgcatgcaggctaacgacaggctgcaggaatgaccaaggacaccgtccctttcatcggtcgcgtgcccgaactcgaagggcagttcgtgacggccggccactgcgggtgcgtgcttcctcaccttttcctcgcctccgctcgctgactcctgcggcggcagtcagtcacggcatggcccggatcttcaccgcttcgcccgctctggccaggatgatcctcgacccgtcgctcacgtttgcccagacgggtctgcccggcgcgttcgagatcacgatggagcgagtggcagcgctgaagtacaagccgcgcccggggcggaacatggtgctcagctaggtcgagcagacaaaagcgtgatgcacggcgctttcgaattaagttgtgtctgcacgtgtcgaacgtaggttgagactcagacgggtcggcgagcagatggagagggcagcagagtccagctcgggaagcgcccagcgctttgcccatcccagcgattagagtagagcgagagagagaagaggatccgggtcaggtcgatcagtgaccgcctccgtgcctgcgaggaggggcgttaagtcagcccaagaagcatgtgaagtcaacggcagggaggtggggcgcaccggcgcttgaagacgccgtggccgatcgaggccgctcgcctgcgattggccgggacgggcgcgagcgtctggctggcgacaggggcgaggccggtcgaggtaccgaccgggatgagctcgatgtagactgtggcggttacggtcgaggtctcggtgacggtcacctgaaggaggggtgcgggatcgtcagctaacgagagagaagacgagcgagaatagatgcgagggacagaccgtgctcggctcagtgcaggccatcgcggacggtgaggccgccacatcctcgacgctgaccgaaggatcgtcgtccgtttcggcctcttcgttcgcatttccggaggacgaggagcccgcctcgacgtatgacgtcgacgacgactcggccaattcttctgtgttggacgaagcgactgccggagcaggagcgtgcgttgccgtcgtagcggatggcgaggaccatgatgacgtccgagctctgcaggcagtcttggagcggctcgaagaaaggaaggcgccgaaggcacggtcgaaggaggatgacgcctcgctgggcatgggcgcggccgaggaggacatgtcgacggcggtcgtcggcttggaggtctcagtctcggcgaggctttcgatggacgagctgccagcagcaagatcgaccgacatctcgacgaaggcggaggaaacgatcgaggtcgggacggccggtccggacatgaaggtcgcggtcgacgtcgggctggctgcgctggcgtcgacgtcgatgctggaagaagcaaaggcggcgtctgtctgctgagcgaagccggccgacccgacgctggacccgctcgaagccatcggcgttggcatcgggctctcagcgagcgaggggctgcccgccgaggcaatgctgccagacgcagaagcgaaggcggtcgatgtaacgccgctcatcgcgtcgctggcggtcgcggtggcgacgctggcgacggccgtgatgacgtccgctgcaaaatcgaggaactgggtgttgatcgcgagcgggatcgaggccgtcgcgttccagtagtcgatcgtcctgttccgaggtggggctggcagaggtcagtctcggacgacaatctcgatcgaggagcgagaggtggacggacgtcgagtgaggtgagcagtaccggtaccaagactcagtggacgggtactcggtcacgggtgctgcggctggcgagccttcgaagggctggacaaagtcctaagagggaaaagtgcagggatgcaaggaagcgtgagcgtctgctccccttgatgaggagatggcatcgagagcgaggggacaaacgatgcacgactcgaatgtctgatcgttggccttctccgagtaccagtaccactggagcacgcaggcgccgggctgaccgacccgagcgaagagacgggcgtcaacgagtgcagaccgagagtcggcggaatgaggaaaggcgcacctcggtgcacttgttgccgagggcggggaccgtcacgttgaacgacacctcgtcgagcggcgggtagctagggcaagtgttggaaaagtcgttttcaagatactttccgtcggtccactccttgagcgccgagccgatgaccgtgttggtagccgtgtcgacgaccgagacgctgcagggaggcaaagcaatcaatgacgagcgttccgacagatgacaggcgagccgaaagcgctcactttgcgacaccgccgtgtcgctgatggagcacagagacagggggtcagccgagccgtattcgagcacccggtcgaactgtaagacgcacgttgagcgagaagatctcgatcgggacctcggtcccggcctgccaggtgtagacgtgctcgcggttgtcctcaaactgcgcaccgccacagagccgccagttgcaggcctccggcaggacgttgccggcgagatccttgccggcaatcgggcccatcttgttgttggcgttgtcgtggccgttgctggagggcagagggcggggacaaggagagcgtgtcagttgtgggaagccgaggcgagaacgggagggacagaccggtcgttgtaccactgctggccgcaaacctctttcgacttctcgccagcctgaaagagaagagcaggcgagttacagtcagcagatgagcgtcgagaactaggagcgaggtggctgacagagcgggtccaaggctgaatgatggcgcctgccgtcgtcgagccggagagggatgtcagcagcgagctcgaacagcgggcaaaatgtcgaccgacgccaggcaggactggccgtgagcggcgacttgccggccgagaagtgagacgaggaggagggcgggggtagtcgagcgggcgagcatgctttcgaaggaaacgtaagggaggcgggagcgagtaagaaggtcggcgggcgaggaggatgaaagggaaggccgggaagagatcgccaggatccgtttggagaaggtcggtgcgagagaggtgtcaaacgagtgagggaaggtcctagacgagggacgagccgaaaaggaaggttgcggccgaggcgcgggcgaaaagagtgtgaaggaaggaggatgctggtcagggggaacaagggtcacgagctcgtcttttcgcgagatcctctcggcggtcggcgctctttggccgcacaggaggagggagggcgtggccgggctcacaaagggggcagcggcggtggctggcgaaaggggggctcccacgcggcgagcacgcacggagtagggcgacaacaccatcgctcggcgcccaccgcgggccgagcacggtccacgactcgtcgtcctttcaggtcgctgagaagaaggcggttttgacgagcgcgatgtcgctcgtctcgcaatgagggtcttgctgcgcacgagcgttcaaaggggggtccgacgagcgagcgagctcctgtcgtcgtcaaatgatcgagcagaggccctgatcagcccagggtagcgagtgcgaggacaagtctgaaataggggtcatagtaggtggatcggttggggaatcgtgagtgagacagcgagaggcggcttccttttattggcggcgacgggagcgtccgagcagagtgagatcagaaagggggcggccgagatgaaagacgaatgaagggcagctgagagcagacaccaggcagacgtcagctgaggtgagagacggcagcggccagtgacggcagagcgcaccagggccggagaggaggagagtcgtcggcggcgggcgagcgcagcatgcgcgtgcgctggcaagcgggagacgcgcgagatggacgactggaccgacgagcgagcgagcgagccgcctcaagccttcttgccgatgaagaggtacgcgagctggaggaagactgtcgcgcgatgacgggagggcaatcgtctacatcagcgcctgaggttgacggcaaaagggagggccgagcaggtgggcgggcgagctcaagccaggaagactgacagccacccgagaggacggcgacgaggccgagcgcgagccactttgtgtattgggcgttttgcgtcgaggcctccttggtcttgcgctcgagtgtcgaccgcttggccggctggcgttggccgacctgtgagagagcagcgaggtgcgagaaggcgtcagatgctggtgcggtcgctgctcgggaccgggcgaggcgcgtgcgtgcgtgcgtgcgagacgggacgcaccttggacgcgtaggcctcgtttttcctgcggatgtcggcgggagtgggctagcaggcatggcacgatgtcagctgagacgtcccgctgcagcatgctggacgaagggacagaccatggtcaagtaagaagggtggacgtgagggcgaaaggacgaggctaggggcttgacagccgcctctctccatctcgcccgcgcgtccgaacccctgggccgcgaaagaggtcgagccggtccctccctcccgccttcctgccgacctcaaccccaccctcgaccccgcacccctcccagccagctctagacgatcgctccaggcgagctctcctctgtctctctcaacatccgcaaaaccagcctcgaaaccagccatgcgtcccgccgccctaccgctctcgccggcgtccttcctcctcgcgtcggccttccttgccctcgcccagcgggccgatgctcacggcggcggccactcgcacggcgagaactacgacgcccatggcgccaccgacgatgcgagcatgagctacgccgagcgccacgtccgtccccgcctgcgtctccttggagggccgtctgagctgacccaccccccctctctctttggccttccctgcacacgcgcgcgtctcttgtcctctccttcagatgcgggccgagcaccacatgtccgtccctctctcgcggcagccggaagtcagcagacgaggctgacctcgccctttcctcgcgaccttgcagcgacgcctttgacccagagtcgttgtaggtccctccccccctgggtctcggctgctctccgtcgcgctcgacgcgggcgcggctgcttttgagttgggtcgagaccggctttgatgagctcgctctcgcttacctttccttccccgctctctactctagcttccacctgcacgacctcaaccacgatggtgtccttgacgtcgaggagatccaggcgatctgtgcgtccgaccttctgccctcctgggccacccctcgcccgtctccgcagtctgcttcactcggaggcactgacgcgcgcgcgacccctcatcccttggcgcccacccctgcagacggcgtccaccacgactcgtccaaggccgcctcgtccgacgacgccgagcacgccgccaaggcaaagacaatcgtcgacacggtcctctcgctcatggacaccgacggcgacggctttctgacgctcgcagagtttgtccgcgggagcgcaaaggagggcgaggaagggttgacgggcgagatgggcggcctgcctgacttcaagggctacgaggagctcggccaccactacgacgaggagagcgagtagtgcgttcggcctgcctgcccaactatactgttctcaggcgatcggctgactctgatgccgtgcgtgacagtttcctccaccatgaggagatgtaccactcgacgcccgaggtctgtctgccctggcaggccctgccctggcagccgctctacccttgccacgagctgacgtctcttcggctctccgacccctctctacagacccagaccgacgaggcctacaaccacccggaggacattgcccactttgcgacgcacgagcagctcgagagcaaagaggaggcccgcgcgcgcaagtacatggaggctgagaccgagacgcacgctgacgccgcgcacgacgcggccgtccacgactctgcggccgacgccgcgcagcatgcgtcggagaagcgcgcgaaggaggccgaggcggctgaggtcgaggagggagttcgggcgcgcgaggccgacgagagcaaggtcgaggtgaggcggccgacagcgcgcgaggagcttcgaaaggagcgcgcagaggccgaggcaagcggcatcgcgccttatggcgagggcgaggacggcttcaagcgcccgcggacgcgccaggagcgcatgcgcaagggcacgccctacaaggtgcggccgccgttcgctcgagccgagtttgccatggctcgtccatctgaccgctcgcacctcgtcttcccgtcttgcagtacaagttccgccggacgtccaaggagttctaatagtccacctctctcccggatccgtcatctttcgttgatcaggcagcactggcgctggttcgccctgctcgcccgcatctcctctctgacctcgcacccccttctgtcatacgcacgcttgcgcttcgaaccctcaccatctgcatgagacctctgccggaacccaagcactcattgccgtctacaagaagagtgcatctatcaagcgagacctcagtgctttcccatgtagccgacgacgccgaaactgctcgcgctccccaagacgagcccgccgacgaggcaaaagacggcaatcgtccctgcgagttcctgctcgccctctgcgagccgcgggttcagcgccggcgtcgaggcgacaatcatgccggtcgcgctgacaaagccgttggagccgccgaggaggaagaggccaagaaggaaagtgccgtccgagaaagggggcgaggaggcggtcgtcgtcaaggaaaggagcgctcgggccggcgtgttgcagccgaggaagaatgggatgaaggcgagccgggcgagcgcaaagagggcgagcgtcgactgcgatcggagggtgacccgcgcgggcagagcgcgaccgacgagatcgccgactgagagaggcaaaatcaggcccggcttgggcatgcggggttcagacacagacaattcggcgcaccgttgaagcaaaggaagccgagcgggacccagatcgcaggctcgcgccaccaggcaccgaggccgacaggggtgaccgcggccgtcaccgccgggaagacgctgagtgtgacgacaaaggccagggcgatggatccgttggcgagcgcattgcgtcggaacagatcgagcacgggcgatgacgggtttgaagtgaggtccgtcgaggagtcgcccgctgacggagtcgagctctcgatggcggcggccggcgcggtgacaagagcgagcgcgtgcgtgggatgagtcgaaatctgatccagcgcaaagagggtgtctgagtagcaaagggagcaaatgtcagagccttctgcgttttccgtcattcccttcgaagaagagggcacgcacagagttggaaagcagccccggcagcgacgaaaccgaacgtcggccattggagatcgctcttggagtctgcgccgcctcccgcgctagacgagtgcgatgcgacgaccgatgacaggacctgaacgagcgagacgagcactgcgatagctccctggccggtcatgacggcgcccatagcgcttggaccgaagagcctgtgtcgcagtgagcgggaggggggcgcgcagtcttcgtgagcaggtcgctcggtcgggaaggacgacgatcaggatcggacgcacgacgagtaggagacgaccgaagcttggaggtacgagcccgcaagcatcatgcaagcgacccagcaagcgaggagaccgaccgtccctacccctccctcgccggctgcaggcaggaggacgatcaggagctcgaccgcgccaaaggcaagcaggagcgcgagcaggctccgccggatgctcctgacgagcgcctggccgccagtcgagctgctcccgctgcctttcctggcgctcgagaaggtgatatatgagagtgcgagaaagttggtgccggtcgcgaggaaggagagggtcgagggaagcgcgctgctctgcagcggtgcggccggcccgagcagcgatgcaaaaaaaggcagagccgagagaatgaggttccacggcaggaggacggccgcgccgaggacgaggaagggcagcgtcggtggcggtgggaaggctggcgcacttgccgggagaagcgaggcggccgaggaagtcgtcgggagggccgcgtacgggccggcggcggtcggaccggccagcgtcgcgccagtcggcaggagcgatcgcaggacggcaagcatgccaggcagactagcaaaagccagggccgggcgagagggttgtggctgatgatggtggtgggttgcagcctgccggccatctggctagcgaagcaggccaactggggccgcccttcgggctgcgcggtggccgcagcggccggcggccgacagatgctggctgctgctcgggctcaagcgaagcccctcgatccactaccttcagacctctatccttttcactcgccagtctgcccttcttcgccatgaacgcgactggcctcctcccggacgctcaccggggtccgggcgtctgcgcgatgcgcggcggctgtgggcgcaagagccccttcgacccggagctgccctgcgtcgacgacggcgcggccgatgaggtcaggacctccttccatccggcgcaaggcgattctgggtcgcattgcagtgctccctaacagcgagaagggttgtcagagtgctggcactgttgcgagattttaaggcctgcgggcgatgctcctggatcgccctcgtgctccctccgatgacgccgcctgcgcccatctcgcttcacggctgaccctcttctcgtcgcatggcagacgacgcccgagcttcgcgaccttctcggatcggtctgcggaccgtccttcgacatcccgccgacgctctgctgcacgcaagaccaggtcgaggcactgcgagacaacctcctccaagccgagccgtgcgtgccggccgcagtcgtacctccacctcccactcgagctgaccatttctttcgatgtcccggcaggctcatcgcatcgtgcccagcatgccgcaacaactttcgctccttttactgccacttcacgtgctcgccctcgcagtcgcagtttctctcggtcgtctcgactcagcccgtcggccggggcgccaacccgcagacggccgtcaaggagattgacgtcttcgtctcggacgacttcaagcggggcttctttgatgcctgcaaggacgtccagtttggtgcgaccaactcgttctcgatggacctaatcggcgggggcgcacaggacggccagtccttcctcgagtatatgggcaaggagcggcccgggctcggctcgccctttcagatcaacttcccgccagaggcacgcatgccggccgacgagggctttgagccgctcgcaccggctccgctccgctgcgacgacttttcgcggctcgactcgcgctgcacgtgcaccgattgcccggccgtctgcccgacgttgccttacctcccgccgccaccgccggcccacccggcaccgtcgtgccacgtcggccgactctcgtgcggggctttcacaatcgtcttaatctactcggtcggtgtgctcgctctcttcgctgtctatgcccttcaggcggcggtgcgagcccgcgtgcggcgctacgagcgggttgctctgctgccggacgaagagggcgaggctgcgcccatgtcgccgaccggcatgtcatcccagcctcaggctggcacctactttggcgcgccccggtcctcgtcgtcgtcgcggcacggtcggtctggctcgcagcattcgaacacggccggcagcggaaacggctacccagcctcaggccagagcggccagagcggcgagagcaacggcctgatcggcggcggcgcgagcttgctcgatccccgcgagcagcttcagccgaggagaagccgggtgaacgtcgtgctcaagaaggccttctaccggcttggcctcttctgcgccggcaagccctgtgcgtcttaaactcgctgctgacgcctttacacacagagactgactccaagcctccccagtctttacgctctccatcgcctcgttcatcatcggcttgctgaatcttggctggaagcgcttcgcggtcgagacagaccctgtccggctctgggtcgcgcccgggtccgaggttgccaaccagaaggcccactttgacgccaactttggccccttcttccggccgcagcaagtctttgtgacggccgcctcagcaccgcatgtgaccgacgacggcgagagtctgggccgggagcaagaatttctcctgccggacccggccgagccggctctcacgtacgagcgcctctcctggtggctcgagcgtgaggaggagatcaaggcgcttgagtctgagcccaacggctacacgttccaggacgtctgctttgcgccggccgggcctggcacgccctgcgtcgtccagagcgtctcggcctggtttggctttggcgtcgacgtggacagctggcgggcgacggtcgaccagtgcgccaagagccctgccgagtgcctccctgactttggccaaccaatcgagcccaagtttgtcctcggtggcggggccatcccggatggcgagaccggcaacggccgatggtccgacgccgagagtctcatcacgacttttgtcgtcgccggccaggccgagggcagcacagagctcgccaaggctgaggagtgggaacgaacactccgacgctacctggccgacctccagcggacggcgcgtgccgacagcagttcgtgggtcgcctactcgaccggcgtctcgctcgaggaggagctcggccgatcgggcaacaccgactacaagacgatcgtcgcctcgtacctcctgatgttcctctacgtctcgctcacgctcggcggtggggcggcgagcggctccgcgcttctctttgggcccgacggcatctttgccatcctcggcgataagctgctcagcgtcctcgttctccttcgcctcgcctcaccgccacccggtccaggccgatcgagctcgcgttcgatccctgccccttcgcaccggcttcggtcgcggctcggccggctgctgaagctcctgccgacgcttctgtcggtcaactcgaagtttacgctcgggctcttcggcatcatcgtcgtgctcgtctcggtcgcctcctcggtcggcctgttctcgctccttggcgtcaaggtgacgctcatcattgcggaggtcatcccgttccttgtccttgccgtcggcgtcgacaacgtctttatcctcgtccacgagctggaccggcagaatgctctccacggtccctcgtcggcgacaatcggctcgactggcaggagggcggttcgcggccagctgacaagcggcgactcgttcgaagacgacctgctcgagggtgccgacgatgaggacgtcgagatgccgccgccctcgcatctcccggtcgaggagcgtgtcgctcgcgccctctcgcggatggggccgtcgatcctcctgagctcggtcaccgagacggtcgcgttcggcctcggcgcgctcgtgccgatgccggccgtccgcaactttgcgctctacgccgctggcagcgttatgctcgacgccctcctgcaggtcaccgtctttgtctcggccatggcgctcgacctgaagcgcgtcgaagcgacccggatggactgctttccgtgcatccgcctccagcctccggtcggcctctacgactcgcctgtcgcggccgtcgtgtcggatgagggtgtcatcacgcgcttcatccgtcggcactatgcgccattcctcctgcggagggaggtcaaggtcggcgtcctcgccgcttttgccggccttgcgttgctctcgggcatgggcatccagaagatcgattacggcctcggtacgtcaggtgcttgcacgtgcccaccctctgcgacgctgaccccgcacctcttcgcttcagaccaacggctggccctcccgtccgactcgtacctcgcgccgtactttgatgcggtcgacaagtacctccaaatcggcccgccggtctactttgtcgccgaccacctcgacgtctcggcccgcgagggtcagcaggcgctctgcggccgcttcacgacgtgccaggagctttcggttgcgtcgacgctcgaggccgagcgcaagcggcccgaggtctcgttccttgccaacccgccggcggtctggattgacgactttctcggctggctcaatccagtgctcgagtcgtgctgccgcgtgcggatcgcggacccttcgacgttttgcgagccggacgagccggcacgccgctgccagccgtgcttactcgatcgagacccgccgttcgacattacgatggccggcctgcccgagggcgacgagtttatgcgctacgtccggcagtggctcgagagtccgacgggcgaagactgcccgctcgccggcaagtcgtcgtacggcaacgcgctcgcgctcgcggccgacaacagctcggtcgttgcctcgcacttccggacgtatcacacgccgcttaagacacaagaggactttatcaacgccctcgccgccgccaaccgggttgcggccgacctgacggcccggaccggcgcccgcgtctacccttactcgctcttttacgtcttcttcgaccagtacgcccacgttgcgtcgatcctcgtcgaggtcatggtgctcgcgctcggcgccgtcatgctcgtgacgacgctcctgctcggctcgtggcagacggcggccctcgtgacgacgacgtgcgcgctcgtcgtcttcaacgtcatgggcacgatgggcttctggggcatcagcctcaatgctatttcgctcgtcaacctcgtcatctcgctcggcatcgccgtcgagttcaccgctcacgtcgcccgatcgttcctcggcgccggcggcggtggcctgccgtacgaccaccagtcggcagccaaagaccgcgacgaacgcgcttgggcagccttggtcgacgtcggctcctcggttcgtcggtcgtgcccttgcacgacgtcgagaacatcagctgatccacctttctccaggtcttctcgggtatcaccttgacaaagctcatcggcgtcaccgtcctcgcctttacgcggtccaagctgctcgaggtgcgctgcagtcctacgccggccgagcttcgccgctgacctgtctcccacccctttcacgtccaggtctactttttccgcatgtggctcacgctcatcgtcgcgggcgcgctgcacggcctcgtcctcctcccggtcctgctctcgtatctgggcggccagggtttcgagtactgggaggatgccgatgagagctggatgggcgccgccgcccgggtcgactcgtttgcgccgttccacgacgatgactcggtcgccagcgactagacgaccctgatgacatgtacgattgtaggacgacgagcgcgtgctggcctctcggggagggagcgccgaactgccgcgcccgcggaagcgacggccatggccgcctgccgcccgtcgactcaggccttcctcgaacctcctcctcttgctgccccttgcactcagtccccagtttgagagcctaccgcagctcacactggccgcatgtccatcctcttgcagcgcctaggcgtccagctacccctggtccaggcgcccatggccggcgtctcgaccccggccctcgccgctgccgtctcgaacgcgggcgctctgggctccatcggcataggcgcctgcagcctctctgacgctcgactgatggttcaacagacgcgcaccttgaccgaccggttcgcggtcaatgtcttctgccacaagtcgccaagagtcgatgctgcggccgaggcggcctggctcgaccatctccgggtcgagttccggcgcttcgacgccgtgccgccgaccgagttgcggacgatctacaggtcgttccgcgacgacagggcgatggcgaccatgctgatcgaggagagcgtgccggccgtcagctttcacttcggcctgcctgtccagtcgatcgtcgacgacctcaagcgggctggggcactactcctcgcgacagtcaccaacgtcgatgaggcccgcgctgccgaggcggccggcatcgaggtgctcgttgcacagggctacgaggccggcggtcatcgcggcgtctttgcgccagaccagaaagactcgcagctcggcacggccgccctcctcaagagcctcctcaagagcgggatccgactgcccctcatcgctgccggcggcatcatggatggcaagcaggtcgcagccgcgctcgcttcaggcgccatcgccgctcagctcgggacagcattcgtcccctgtccggagagcgctgccgacgacgcctaccgggcagcgctcgccgaaggaagcaagacggccatggtgagcgcgatctcgggccggccggcgaggacgctcgttaaccgctggaccgagcgggtcatcccccgtctcgtcgacggccgacccagcccaccggactatccgatcgcctacgatgccggcaaggcgctccatgcagcggccaaggttcatggcgagggcggctacggcgcgcagtgggcaggcgagggggtggcggcggcacgagcgatgcctgcggccgacctcatcgctctgctcaccgaggagctcgcagaagcaacgagggtagcagcctgatgggatgcgcctcgatcgacccaagttccagcagcgcatgagatctcgtcagaaaggcagaaaatggccggcctcacgcgctcgcgggcaggtcgcgcagcagacgccggagctccttgttcgtgaagtcggcgttgtcgaggtagagatggtgactgccgaaggatgaaggtgatgtcagttgagctgcgccttgtgacagggacagaaggtcagggacgaacccggcgttcgggacagtgatgacctcgcagttcgggttgttgcgcttcttgaggatctccttgacggcgaaaccgcctttgacgtccatccagtcggaggcgccgtagaggaaagcgatgggcctaaagccgaaggcaagtcggtcagctcacgtcttcgcctcaaagacgctctcgcaaccacgcactgcttcaggtcgccgagccgctcctgcatcggccacctcgcaaacgcccccggtgcgaggaggtggtggatgcagaactcgcccgacccgcgggccatcgagatgctggcgtgtcgaagagggaggacgaacagtgagaggagcgtctatcagtgtgaggtctgacgaggtcaatcgcaacggccgagcgcacccgtagatcaaggcgtgcatgtccctcacgtccgtctcggagaggccctcgaagcgtctcgagctgtacatgccaacagtcttgggagcgaggggacccagagctgtttttgggcgagtcggcccggtcagccttccgatgcgcaactcgtgcgacctgcccggcaggcagcgggcgtacctcggaggacaccaaacggactgtagccttgctcccaggcccagccgataacgctgcgaatgcggctcgacggcctgacgaccggctttataggctcctcgcctgccttgacctcggttcgcgtctggccgagctccttctgagccgcatcagctagctcggccgtctcttctcctgtcggctcctcctgctgcttgggttgaaagttgagccgtgaggtcttgggcgggatcggagcggccgccgccttgtccgactcggcgtacgggttagccgggatacccgcgggtgagagcaggataagcttgctgacgcgctcggggtagcgtagcgtgtaggcggccgagaggtagccgccgagcgagtggcccaccagacacatcttctcggccccgaccgacttgcgccagtcctcgagcgcctggacgaagaagtcttcggcatgcaggacgcgcgtccggacgcgctcctcggcgatcgctgccgactcttcggccgtcaacggtggtgatgaacgcggctttggagcgggtggcaggtcaaactcctttggcgagggtcgggcgcttaggcccatcccaagccagtcaagcgcgactgcagagcaggcgagaggtcagcgtccgctaaggctcgcatcgcagctcctgctacgtacatgcacgtcgtccagactctgccgaggccgagccgaacgtctcgaggttgttgaagaagaagcctagaaggaaggggaaagaaagcgcaagaagtaaagaaggacgagaagaaagggagggcagaaaggatgtcagcgactcgagttgaacgatggctgcgcagcgagcggagaagaggtggggtcgcagggcaaggccgcaccaagagcagcgccatagccgtgcaagaggacattgatctccttgctcttgctcttggtctttggtgtccagaaggccaggccgtggaggtagcgcggcggcgacacctttgaccggccgaagaacggcaaacgactcgaggcacccgaggcggcgccgttgagcgacgatgtggtcgagcctgctggcgagctcgatctgggagcaggcagcggaaagtccatcacgcgcgagatcaaagggtctgggttggatgctgtcggcaaggggtctggggttgaggccaacgggatgaaggacggcaggcgtctggttgagcagtggaggcgacggtcggtcggtcagcccgctcgcacatggcagatatcctcctcgcgaaggagacgcacctcagcagccgctcctcagccatgacgagctcctcgtgcttgttgccctgcgaccaccaagcggtaaacgacgaggcgtacgtctttgggacctcggccgccggtcgggggctgctcgtccccgaggcgggctccgatcctccaccgctcggtggaggcgatggcccggcggcaggaaagcgctcgtcgggcaggtctggcagcttggctgtagggagaggggtggccatgtcgtttatgagaggtacaggtagggtgcgaactgggggtctgcgtaggatgtcgaagtcgggagggccggagagggctgaaggaggaggtagatcgggcggccgccgaccggaccctcggcctcctccgccggcgcgccggcgctgacgcgttccgaacactggaccctgcctccaccggccggcagacgacgacgacaagcgagccaacaggtctcgagccttgccatgccggttggcaatgaaagcaaggatggcagtgcagtgtaccaaatcgagacggacgactcgccctactcgcggtcggcttcgcgcagctgccggcgggacggatgtaagccagccgaccttgctgcctggccccgactgctgcccatcaagagcatgctcgcctcgagtctcgctacacgtcgacggccgacgctggacaagagcttgcaggctgacaggcgagcggtccgatcccaacccccggcagccaccgacaagcaatcgagacgaagaccatgtgtagagggagatcaaaggcgaagggaagagtggcgcagtcgaggtcctgagcaagcgaccgggccgggcgaggaagaagaaggaaagacgacagaggaccaagcttaggcgccgaagccgtagagggtccggccctggcgcttgagggcgtagacgacgtcgagggcggtgaccgtcttgcgcttcgagtgctcggtgtaggtgaccgaatcgcggatgacgtctgcgaggaggcaggaggcgcaaggtcagcatgtgcaagcgacagggcgacgagcaagggaggaaggtcgacgcactctcgaggaagatcttgaggacgccgcgggtctcctcgtaaatgaggccagagatgtctccgccgtcaccgccgccgctgcccttgctgcctccacagcccttgcccttgtattcatctccttgaacgaccgcactctccagccggaaaaagagtccttttagctagccatgtttgatcgatgcttcgcttgaacgatcgccaagctggtgcgatgggcactggcaagcgactgaagaaggggcgcatcgagtggacctttggcctgctcatgcgccctcgtcccgagggcgctgctgcgcctgttccgaggtgtttgtccccctcagctcggtcatgccctccttgaacggccgctctcgctgctttcgctgtctcttggagttgatcttataacaaaggggcagcgagggcgtcgggagtggatgtttccggttgctgctgcatggttgagcggaaagaacgagatctaggtaggtgaaggaggctgggatttgggagcgatcgtgcaatgcagtggggcgcagagggtatacgtgaggagcaaagaaggggtcgtgcgaggtcgagatcatctagtgggaaaagggaggtcggtcgcccgagcggaaaagattgagagaggccggctctacactggggcgcctcagccatggatgaacgccaaagcgagcgctccagcacccgcgacgagcgtcccgaccaccgccgacggccatgcgcgacgcgcgcccgcgctgccttcgcccggcggccgggcggtgatacggatcgtgaggacggcgacgaggccgtcgatcgccgggaagccgtcctgctcgaccgtgtacatatggttgatgcccatcgacgagttttggaggaggccagagacgtagcggacgtcgttttggtaggtgtagctgcaatcgagaaaaggaggtcagcgctgcgctctcagggcacggaggggcgagcgctcgacctcacttcatgtacgacgaggtgccactgtagacggtcgtgtttgtaacgtttctgggtggaatcgtctggccgaccgcacgcgagatgatgtcgtctctgccgaggttgtagccgttgcggatgatgtcgtgctgcttcgcgagattcatctccatcgaggccgcgagaaaccaagcctttgtcgtgttttgctgccagtagcggaagtggtttccgccgttgaacgtctcgcgacaggtgccgaagtagatgtcgccaaagttttcgcggatttcgtcgagttggaggactgcgggcggggcgggtgcggtgatggaagcagtaggacggtgtcagcatgcgcttgcggtcgggcaaagggggaagtggcaggccgaaccaacgccgtcgccgtcgccgagattcgcctcctgaccgcccgggttgatagcgccgaggcagttgcctgaaaagttgaggctgagcgcccagttgaggaagccgccgtcgtccttcgaattgacaagaacctcggcgtccgagtttccgccgatgatcatgttgagcggctcgccgagtccggcagggtacgtgtcgggaacgatggtgagcatgaggccgcctgagacggtggggtcggtgaagccgtcgtaggtctgcgctcgtcgactgaggatggttgaggacgaggacgaggtggcgtcgtcgacgacggcctgcgcgcccgctatcggcggcatcgacggcgacgacttcgattgaccgacaacgacagcgtgaggagcgccagcaggcgaggcagcgacgctagtcgtgagcgcgacgaggctaagcgcgagcaggcggcaggcctgctggaggacgctgctggccgacaaaagcgtcatgatgcgggctgactggaccatggcggtcggcaggttcgtgtcagtcttaagccgaactgcggcgtgcaaaggtcaaagacgacaagcggacgtacggagaagggattgacagaggcgatgcggtcgaagagcggaggatcgacaagaacggcggcgggcgaggagccttggcgagagagtcggtcgtcggagcttcggagaaaggatggcggcggcggggcggcgaggaggcggcggcggagcgagtggcagttcagttcagtaaggacgcgtgtcccttttccggcaagtctcaaatgggcgtccgaactgtccctggcgtgcgtgtgctggtcgtgtgcgtgcgtgcgaggtcgaagaaggcagggcggtggcagacaaagagaggcgtgcgacgaccgacgaccgctccaaagtccccgccgccgcgcgcagcagccccctcgaagcgtcatccggtgcactggccgtccggcctatcgattcgctcgccgtgtcgtcggccaaagcaagacgaacaagcggctcacagtaacctcctgctggctgctctgaaaatttggaacgcccgcccagcagcaatcgaggcagaccttgggggaatcaggcccgaacgtcgacttcgagtcgagcagagagaagaagcgaccgccggtcatggacaatcagagcgagcgcacttgcagcacctccgcaccgcccacttctccagcccgctcgagcaagacaaagaaacccatgcagaggcaaggcgagcaggccatcaagactcagaacacgtcctgccctaccgcgttatcctcagccttaggccttcatgaagctgacgcccttgccgatgttcttctcgagctcgggcaggcaggcgtcgatgagcttctgctcggcgtcggtcaccttgccgaccgggtggatcttggcgacaccctcgggctgacgggtagagtgagaaacgcgagtcagcgaccttcgaaaccagagtcaagatcggggcggacgagtcacgcacgccgagctcaatgttggacgagaagaacgcgaggtccttcttgccgagctcctcacggagggccgagcccgaggccttgtcggcgtcgagcgagacaaacgagggcgagacgaggcccttctcgcccttgtacatagcccggagaacgaggtcggcaaacttggcgccggctgaaaagacaagagaggggtatgtcagtcaaggggttccaggagcgaggcgaggataagagggaaaaaaaggaagagaaaggagggattgaggctcagtcccgaaagatggttaactgtggacatcattgccgtgcaaggctagtcgtagtttggcgcatggatagcggtatgcatcattcgcctcatcctccttctctcgaacaggaaattggtcctgccacttcttccccgcaagactgccccgcacacctcccccgtcccgagcgtacgatgcgcagtcggttcgggcacaaacgccccttgaggtgatgcaactccccggaggcaagagaaaaggaaggaggacgacgcaccctgagccatcgagagggtggcggatccggcaccgtccttggccttgacaacctctgccgagagcagccaacgaagctcgtcagcgccttcctcttctctcaccgggggagaaacagcgtaagaaacaacgaaccgtcaccgccgaactggatgcggttgacaagggcgtcgagcgtggccttgtcgccgacgaccgactcggggacggccggcttagcctgcgagaggagggggatgatggttacaccagagtggccgccgatgacgctggagggcaagaacgagcagaggcgcaagcacggtcaggatcggagcttgcgggcgaagcgcttggcgagcgagggcactcacgggatgacgtctgtgagaggcaggcaggcggccgcaagaagagaaagcgcagtcagcaaggaaatggaggatcacggattagaagcggacgaggccgcacagtcggcgaccttatcggtcgtgttggtgacctgggcgacaaaggtcgacgagcggacgacgtcgagcgtggtgacaccgaagagccttgcgaacgaagggtgcagggcacaagcaggcaattgatcagcccggccgatcatagcagcctgccagcaagcgacaaaggggttgacgcacttcttggggtcgaaggtgccagccttcttgaagacctcagccgcgatcgggacggtcgagttgaccgggttcgagatgatgaggacggcggccttagggcagaactcggcaatgccctgcgcgaggtcgcggacgatcgaggcgttggtgttgaacaggtcgtcacgcgtcatgccgggcttgcgggggacgccggcggggatgacgacaatctcagcgccggagagggcgcccttgaggtcctcctgggcaaagcccttgacctggaggagcgagcgatggcggcgagggcagcgacgagggtgtcaacagccggtctccagagatcggcctgcgcgcaaaggccaggtggaacgcacggtggcgggcgtgtcaatgtggctcaggtcggcgccaacaccgggcgcgccacggatgtcgtacagccggaggtcggtgacgtccttgttgagcttgaggaggagcgagaggggctggccaattcctcctgttgtccgcaaacgcccgcggatcgcaggaagatattcgaacggcgagaaataacaaggaggagacagaaaggagtaaggcaggttcagccatgcgcttgctgctactgctcgcttctggccgagaggggaagggtcggagcgagagatgcaaaacgatgggcctccctccgggtccgcccgcaccggtcgagccgagcatccacttcagaggatcgtcgacaacagcccgacactacgcgagtctcgcctggaatactgcgctccgatcgatgagcgagcgagcaaagtcggcctccccagcccagccctttcaacaggtccgatggcttcgaccggcgcgaccaggggcttgcgcggcgagcgaaagaagaacgctaggacgcaccaccagcgccgaggacggcgaccttcgagaggttggcggccgaggtggagaaggcccggcgggcgacagagggggcggtgcgagcggcgaacatcgtttagggcgggtgcgagtgtgggaagacggaaggggaggtggtagtcggaggagggcaaggaggaggacgaaaagagcggctgttggccggctcgacccggcgggcgttggagaccccgcactacgctgtctgcctcgcatgcatgcaacatgcgagtcgcgcctctcgagcggcggtccttgctactcaaaacactaagggagagggacgctcgtcgaccgaccgagcaactgcgttagtggctttcgtcgcacgatgtctgcctccttacagcatctccttgcaaaaaacctgccgtccgactgcgcacgcgcacagacgactctcggcagaggctgtgggacgggtatcatgcgtaaagggggcagacgaggaagagaggagatgctgtgtgtgtgtgtgtgttgtgtgtcagagtggggtcgcacgagggcgtagggtctcattcccaagcacgcttcgcccggtcccgtttgagctgcgaaagagagcgagcgagagggtcagcgcctctggctatgaagtccaggtcaagtgcgcgagcgaacgacacaccttgcggtcctcgaagcccgagtccttaacggcgagcttctccttgaagtctgccgccttctgctgcttctcgcgctcgcgccgcttctgcttcgagcttgccttggccttgaccggcggcttgctcttactgtttgccgagttaaggctcgtcgtcggactcgccgccgcatgaccacccgaggcggcctggcgctgatggtcgagcacgccctgctgaccagccgcgtacgctgccttggccttgcccttgatgtcgaccttgtcgcgcgcgagcttgacggccggtggcgggatgtggggcgtcgcgctcgtcggcggcaaatgggcggccgaccggtgctggagcgaggcgagctcagaggcgacccggaggcgggacgacgacggcgcggccttgcctgggaggtcgagcgggactgcggcggccgggcgagggaaggcgtgaatttgggcgaaggcagcgagcgagcgagggcagcggagataagagagaaagagagcgggtgagctcctgacgacgacatccatgcccacaggcctgagggttgagagtcaaaactgacacgacatggctttgaagtcgaggaaaggatggctgtatgcgctctgttgccaggcgaacgtggcgggctcggctgatgactctctctcccttcgcgcggacaagggacttttcgcaagggcctcctctgctgaccgccgtacgtccaccccccgcccgcctcgcccctcccaccggcaggcaacaaagcacctcgtcaccctcccttctcggtacaagaacaaagacgctcgcagacccccggcgtcctcttctttccaccacccgcgtactcgccgaaagccggactcctttgctggatactcccctcttcgcctgcaccaacccgctcccccggccaagcccttgctctctctcgctccagacctggtcagtccgcctcctctctctctctcctcgcatccagacttgccttcagatgggctgatcagctctggaacgaacgtatccaggaagcagcagatacgagaggatcctcgcccgatcgaacggttcccccctccttcctccctcttccctcccttcaaaacgagcgctagctcctccctgccggaagacacacctcgagactcgcctctcgtcgctccgtcctccagccccaaagcctcttctcttccgagtccctaccagactccggacggcaagaagctaccccttccttcccgcctcgtcatgattcaccagtactcgtccggagcgcccggccggcactcgagccggtcggcagcccacccggctccgtacccttacccggccacgcgggctgcagcagccgccgctcaccagcggctcgctagcaaccacgccagccacctccagcagcagcagcagcagcatgcgtcggccggctgggcgacccaccagacggccgcctacttcggccagcagcagcacgagcttcgccagcgcgtcgcagccggcacgatcggcggcggctttgccgtcggcgaccaccctgcccagcgtcagcagctccagcagttccagcagcagcagcagcggctgtcttttgaccggtcgacggccgcgcctgtctgggccggcagcctttcgtcgaccgactcgagcccgttctccgaggcggcctcggacgactttgccgacggcagcggccacgtcggcgactttgcctgcgtcgacgacgacgacgagtcgttcgaggacggcctcgtcaaggaccagtaccgcggccgggcttggtcgaccacccgccggtcgtccgttgcggctatcggtggcggcttcgagccagctcagcattacccggcgccggtctaccagcagcagcagcagcagcagcagccgggtcacctcgaccggctcttcaacggtctccagctgccgcctcttgtcggccagcagcagcagcagcagcagtatgcgttgtacggccagcatcagcagcagcagcagcagcagatgctcccccctctgcagcaacagcattacgctccggtctctccgccggctcccgtcgctgtcgagccggccgcgccgtcctcggccctcccgctggcacctttcgttgccgacgctatctggagccttctccagcagggacccgtccaacctgccgtcgctagccgcaaaacccagcaaccgcagcaggtccagatcaacggccagcttgacgacgaccaccggtggtacccgtgcgtccttctcctccgacctaacgtccttcagcccgctgacctcctgctcgcccctttgcagcgccggcaccggctaccagacgccgccccagctgacggtcgacgacttttcgcttggcccggccggtgccctcgccggcgtcggcaacccctaccggctcgcccctcatgcgccggccggtttcgcgcgcttcatctcgcagacactcgcccagacgctgatcggccccgccggcgtcatgctcgcgctctactatgtcgcccacaagatgccggtccatgccggcggcggcgaggagggcgtccacttccgggacgaactgctcgccgtcggtcgccggtctgagggaggcgaagccgttgccaggcgggtcgtcacgctcggcctcgcctgggccaacaagtggctcgacgacaacacgttcaccaatcggtcatggtgcgtctctcgtctctctagtagatgcccgcctcctcgctgacggcccttccctcctgccctcttggcgcgcacgcgcaggtccgacgtcacgcacatcccgatcgatgagatcaaccggctcgagctctctgccctcgcgaccatgtcgttcgacctctcgatcaccgacggcgaatgggccgcctggctcggccggctctacagctcgtcgtccgacccgctcgtccggtcctacctcgtcgagctcgccgacagcctctcggcggccgagcagcagcgcgcagtcgaggccgagctcgtcgaccgacgcctgcacgacgccgcggccgaacgcgagtatgtccggcacgagcggctccttcaggcccaagcgctcgactaccagcgtcagcgggcggtcgccgccgctactgctgccgcccagcagcagcagcaggcgctctacccgcagacctcgtgcgcgcgctactacgccgggccgaccgacttccggccgttctccgtcgtcgcctaggcgaccttctcagtctccccttttcatcctttttcaccttgaaaaccccacaaaaaagtcgactccgaggggacggcccggcagcacaccccctttcaccggcacccgcccctctctaccaacccttcaccccctagagcaacctctctcattcccgcgcctgcctgtcgccagcgcgcgcggccacaacttgatgagctctcacctttgaatggcgcggcgaggaggagactgggagggggaggttggcggcagggaagacagggcgcgctcggctgtgggagagggctgggaggttgacgtcgaatggacgagagcgagcgagggcaagaactgctgcgcagcggccaacccgcctgtcgccagtacgctccggtccgtttaaacaccacccgtcccttagatgccttagatgccatggggctgttccaatggccagagctgacttgtcgtgctcccagactgaggtccggacactcagtggtggcaggctcgtacagaagcgtgccgctgcgccctccgtcgggagcgcatcggaggcctgaaaaggcttccgtcattcggttctcactcagtcgaaccctctcgaagtcttcctgagaccaagcaaagagctttctgctcgtccttgctcaccatcgagaagggtgtctgaagatgggcggcccgtttcggttttgcggcgcagtgattcgtcggtggcgcagcctcctgcagcgggcagagcagcgctcgctcggagggaaggccgtcaatctgcctgggctgagcagcgaccagcgtctcctaccttccctttcctcgcttccctcgaaagaagccccatcatgtcgactgtcaacggcctgcccaacaggcccacccgtcgctctaccggccagcttgaatcaaacgagcccgaggccacgcccgccgtccagcgggccgagacgaccgactcggctggccctccgaggcagggcgtcgtcggtcgggttgcgaccggcctccaatcactcatcacgccctcgcgccgtgagtactctcgtggttgtccactgcttttgagatcgcccttcgggtccggaactgcaagcggccgagatttggcgtcgaaggcaggaggagggcttggcgtccctcggcgccgctcgacgccgcagatgcaagctggcgccgcctgtctttctttcggttccgttgttcgacgagcgctgacccaaattgaggtatctgtgcagcggtcggcaaggccccaggctacacgtcgtccttcaagacggccatcctccagagctggatgtacgtccttcgacaagagcgcggcagggaggccagcggtgcacagcctctttcttccccgcagcggctgaccttccttgacgcctctccctccttcagcaacgtccttctcgtctttgtcccgatctcgtgggccgctcacctcgccggactctcgccgacgctcacctttgtctttgccttcctcgcgatcgtgagtgcccagtcagggcagaggcaaatctgcacgagctaacaagctctctgcgcccaacgcaggtcccgctcgcctcgctcctctcgttcgcaacagaggaggtcgccctccgagtcggccagacgctcggcggcctgctcaacgcaacgctcggcaatgtgacggagctcatcattgccattcttgccctgctcaagtgcgagttgcggatcgtccaatcatcccttggtgcgtctgtctccgccctgcgttcagagatcgagcgaacgctgatcaaggctgaccctcttgttgacagtcggctcgatcctctcgaacgcactcctcgtgctcggctgctgcctcatctacggcggctcgcgctactctgagcagaccgtcatgaacaccgccgttcgtcctcgatcgtccgcataattgcagccatcgagtgatgctgacagctctatttgctatccctcggtatctcaggcccagctcaacgcctctcttctgcagatcgcagttctcgccatgtcagtcactatagacgctgccattggcaaggctgctcccactcgcagggacgacctgcacctgctgaacccttctttcctccaacccctccaggctcatcccggctggctttcactttgcctactcgtccacaagctcgacctcgtctgtcattttgacggatgccgaggagaaggccgacgtcctcaagatgtcgcgcggcgtcgccgtcatcctccttgtcatctacctcgcctacctcgtcttccaaatgtggtcgcatgccgacctggtcagttctccttgtcgtccactttgctgctgtacatgagctaacgctgccttgctgtcgccctttcgtgtgctgcagtttgaggaccggccgagccagtcgacgcgctaccgcgcaggtatggcggaccctatccggcgagccaaccccttcaagcgctcaggctcgagatcgtcgtcctcagccggagcgggcgccttagttggcccggacggaactgtcgtcgacaaggagtcggtcaacggcggctggcgtgagaagcttcaccttcgcaaaaaggcgtcggcgagcggcgtcgacgaagacggcagcaatccgaccgaggaccagacgaccgacggccagacgagcgagcacgatatccagcgtatcgagccggccgaagttgttgcagaggaagaggaggaggagatgccgagtctcaatttcccggttaccatcattctcatgtacgtcgcttttcctccaattcctctctacctccctacgtatccctctctatcttccttcctctctgcctatcccttactctgtataactggactgacgcttcttatccctgaacaggctcgtttcgaccggcctgatcggctacacggccgaggtactcgtcgattccatcgacggcttaaccgccgccaacccctccctctctcaggagtggattggtctcatcttgctcccgatctgcggaaatgccgctgaacacgtgacggccgttaccgttgcgggaaaggacaagctcgacctctcgatgggtgtcgcgatcggttcgagcatccagatcgcgctctttgtcatcccgcttctcgtcctcatcggctggtgggccggaaagtcagtcgacacgcctgctccctctcagacctactgtgagagagattgctgactcttgtccgtctcatacaggccgttgacgatgctgcaggacccgtttgagacgatcgtgctcttcctctcgatcctcatcgtcaaccagacgctcgccgacggccgggtgtgtcaccctcaccatcgttactggtcacggcagctgctgacacccctgacccttctggtctgacagtcaaactggctcgagggctttctgctcgtctcggtctacctgatgattgccgtcgcgtgcgtcttgcggcacagaccgtccttttgcccgcgcagcagtcgctgataccccccctggcctacgctccgctcctacgcgaatctctagcttctggttctaccctggttccgagcccatcatcacctgctaggggacgtacacccgttgaagcgtcctctgccctgctgcgcatcgtaatctagcgagccagactccccgttcttttccccttgtcgccgaccatacacgtccttcgtcgtcgcctgtatcgattatgtcgcagctcacgctatactccgtctgcgtcgtgaggcggaatccggggaagcagcgcacatgccgagtcggctcggatccggcgggcggcctcgatcgacgcgtctcttctcccccgaccttcactctgtcttcctctgctttagatcccgacgccatcaagagcacgcttgtctagcagctgagaatgaagccgcggctcgcctcacttgagaaccagcgatccttctagccaagcctagctccaccgccatcgctactctccggctgccgccgacgccgctacctcgagacgctgccgtcagctcaacgacccagcgacaatccctcgctcagcctcacctgaaagcggatcatggtgttagttacatcgcatctcgatcctctcacgcctgggcacctcaactgacctcacttgtatctcagccgacagctcccggccgagctcatccacgcggtcatttcggccgggcttgagtcaacagaggccctttatcaagttgacgagcgccggtccaaggtccgcaacagggacttcctgctgacctgcaccttggtcggcgtcgtctggaacgtgcgtgacgcctgttggccttcctctcttggactggtctgacggccattgtgtgttcggcaggcctttgcgacgccgctgctctttgcgagcctcgtcgtcgacaccccggcggacgacgaagctcgcttcatcgaccagcccaagtcgacctccagcgtggcccctccgaccgatcgccgtcggtcgctgctccggctcctgcaagcgcgaccggatctagcagcccttgttcgcgaggtcgactttccggcgggtcaggtcggccagttcgccccgcagttctggccgctcgtccgcacgcttcgactggctagcatctccgatctaggctggctgccgctgccgctcgcccgggcggtcattttcccggtccctttcaagctcgatcgactggcgttcacctcgcgcttgtcgccgctccacgcgccgcttgcaaggctggccgcttgggtcgacctctcccaactcacgcgtctcgacatctcgacctcgggcgaggggcactcgctccgacacgcgctcgagggtgccaaaatgccctatctcgttgaccttcgcgtcgtcaccagtcagaaccggaacgacagcgggcacatcgaggccatcctgcgcacctttggccggcagctgcggaagtttgctatcttcgacaccagcggacggcggcccaacatgccaaacgtcagagggctctgtcccaacctgcaggaacttgccctctccgactttcgcatgcactcgtacggctacccgatcaacccatccgcgccgccccaagcgctcgaccggcttctccttggcccgccctggttcaaccctgcagatcaactgacatgggagccgatcctccctccggcagagcgcaaacttgctctcgccgccgtcgcctactttcgaccgcgccggctcgcgctcgccagcctcggggcaggtgcgctgtcggacgtcgaccagacgatcgccgaccgcttcctcgacgcccttcgcgccgagacggacgaggacatcatccttgaggatcgctttggccgggcagtcgccggagggccgtcgcggggtgcgagtacgcccagccttgtcgacaaggctcctgcccctgcgactcttgcatgaccttcgactcgaacgcctgtcggggaaaggcgtcgcgatacgtaggaccagtctcctcgccgcgatggaatcccacacggagaagcagtagatgcgtcgctctgccgtcaatctctcagccctctccacgcatcacggtcaagtgccacccgtcgtccctgccattccttcccagcctccagccctctccgcgcgtcaaggcgtatcatcgaattgcggccccgcgcgcgggctccgactcaccctgcgggcgatgagtcgcccagaccacgtccaatcgtgacgactgcgctggtcttggcgcgtcgaggcggtcgagctgcgtttgctatgccagccggtcgacgtggcggacgcctggcgtgagaccgtcgagtccatatcaaatcaggccgcggcgttgcggatgagcagcctgactgacgacacgaggacgccgacgagatgctcgtagcaattgttctcctcccgttcggcggcggccgcctctgcgagaagcgtgtcgacgtcgacaacctcaacttcgagctcgtggcggcgtttgccgtcctacgagaatggatgcgtcagtcgcgaaccgagggccgagggccccggaagacgcacctctgtcgacacctgggtgaggtcgacctggacgatctgatgcgtgtacgagagccgatctttggtgcgcatgttaaggtcgggaccttcgggcacgtaatccactgggcgggagacaagcggcaggcgttagcaagccgggcaaggctgagctgacagaaaggcaggagaggggacgcactcggtgtctctgtgcttacgctcagccgccagtcaaacttgctcatcgggctcgaaatgttgaggtcgccgagccggattttttcgcagacctgaacgaccgcgtttgtcttcttgtccttgcggatgcggacctttttgttgccgaccttgcgaaagacgtcggtctcgtagacgtgcgtgtatttaaccggatgcggcatcttgcgcgtgctctgtgtctcctggttgagtagctggttgaagtgcttgtgctgcgactggcgggcgcgagagcaggtgaggtcgtcagcccaccggaccgaccgggccaagcgtgacgcgctggaggagaacccacagcaggcatgtcgctctcaaacacatagcgcaggccggtcgggtcgttgtgcggattggccgagggcgtgagaactgtgggcaagggcgagcgaaaggcacgacgagcaggtcagtccgaccgcctcagctgataccgaagacgggcgacactcgacgcactcgcttccgtctcgaacggcaggaccagccgccgctgagtctgcggatggatcatctggccgatcttagcctcaatctgtgcggcacgacgagtatccgagcgacccgcgaggaggcgcagcataggacggtcagcactcgtctcctccctcgccacctctgacgacggcaaagcaagagcacggacctcgatatgtgaatgcccgcgcgagacgttgcggatccactcgccgatccggcgctgcatctcgtcgtacggctcgacccggaagaaggacggcaggagcgccatgcctgcctgaggctcggcgccgtacggatcgctcggcccgccgccatcgtcaaagggtgcagacgagggcccgacgtgctgaacggggaccggaggagctcttgcagctggcccgtcaccggttctctgccgcttctgagcagacggtccgggcaggcaggccttcgtgggctctggcttgacgcgagcagggttggcggcggccgagctggaggcggcagcggtggcggcggcggcgacggaaggggtcgacatttagaaagcgttgacgtctgtgtagactgcagagaggccagtagtcgacaaagtggccgacagagcgctagctgtgagagcaaggagcaaagggagggtcaacgttaggagctcgtcgtcgctgtcagacgttgcgagcagaagaggaggcgcagcggccctcgttgcttcggacatgggacagcatcgcctgcatcactcgtgtcttgcagcgactctgaaggagaggacatgccgaacttgaaggacctatgaccctgtatttgtcaagcccgtctcttgctaacggtccgtctgacgacgagagacgggctccgctcgcgggccgaaccgagtccgcaagtcggctcgacctccttcttcaaaacgccgccagacgacaatctcttctcctgaccctcaccaccctcttactctcgttctctagcttctcaattcaatcctcgaccatgtcctctgagcccaaagtcgttcgctggggtatcctcgccacaggcggtgcgtcatgcctgtcgctgtcgtcctccgttctgcggctcagagaccggagccctgacgtccttgtcgccccaactctcgtcgccctgcccaaccccccagccatctccaaagtctttgccggcgacatcctgctcgatcctgcgacgcgcggtgtgactgacgtccggcatgaagttgtcgccgtcgggagccgcacgcaggagaaggctcgggcgttcgccgactcgtttggcttgacggcctgcaaggcgtacggcggctacgacggagtgtttgcggacgaagtgcgtgatgagaccgggtgaggggttacatgagctgcagagctgacgcacactctcccactcagaatgtcgacatcgtctacgtcggtcagtcgcttgccgttggccgccgatgacgcgttcctcactgacgcgcttgcgcctctcttcctgaccaggctcgcccaactcacaccactacccgaacgcgcgtgcagcgcttctagctggcaaggccgtcctctgcgagaagggcttcacaatcaacgccagccaggcccgcgacctcgttgccatcgcccagcgtcagaacgtctatctgcacgaggcgctctggacgcggcatctgcctgtgacgatccgtgtccaggaggtcatttcggagggaacgattggcaaggtcgagcgcgtcttgtccgagtttggcatggacgccaaggttgatggttcgtcccgagatctggccgaggagctgttcagagcctctgctgacctcctcttgcgactttctcagagatggacccttcggaccgactcatcgaccctgcgctcggtggtggcgccatgtaagtcttgaggcgtcgacctcagccgtgtcgtgtcttgtgttgactccttcgccgcctcgccgcctccagcctcgacgtctcgccctacgccctctgctgggtgctcgtaccgttacgttgcagcttccggcttctcagccccctcaggcaacatggcagctgaactgcaggtggtgtttctattctgttccctgccaggcttttcccctacccggcggtcccttcagcgcccaagatcgcgtcgcagctgacgatcgcgaacggcatcgacgtccacgtcggcgccgtcatctcgttcgagggcctccagggcgtccaagcgatcatgacgtcgtcgatgcgccaggtcccgcctcatccggtcatcatccagggctccaagggcgagatccggctcaccggcatggcttgctgcccggacggcttcgtcctcaaggtccacggcgaaaaggagcagacgtttcatttcggccagccggagaagggcaacgggctggtgcgtagtcttccaccttcgagcgaacgctggtcgcctctgacttgcccgctcgcgcaactcgcagttctacgaggcggacgatgccgcacgcaacttgatcgccggccggatcgagtcgcctcggcagccgcacgcgacttctatcgctggtatggccatcttcgacgagatccgccgccaggccggctactcgtactcggacgagctcgagcgggtcctatagagtggagtcgaggtcgagtcgtggttgcggattgacatgagacgcccgcgttgaccagtcgcctctgcgagcgatgtctctttgcaaaagcaagcctgctctgttttgcctactcgtcctgccggacatttgagaggcgtctgttttgcgaaacctgggcggacaggcgtctggctcaaggaggaatggctgggtcgactgcgcttttcggccgcaccgcgcgcctctctctcctcccgtcgctcctcctctcccccctgaacctgcacctcacccccttccctcttccacacccttcctcttccctctgcatcagcatcatggccgactcctcgctcaggcgcaagctcgttatcgtcggtgcgtcccgttatgcccggcttacagggctcataaggatgaggatgcaagcgagcgactcgcccgcccgtcgcctgccttcctcccggcggcctatcccctgttctcgccacccttcgctgagactgacaccggtcggctcctctaggtgacggtgcctgcggaaagacctgccttctcatcgtcttctcgtgcgtacacttcccttccagcttgcagagtgaggcggtcatcgccagggccggcggccgtttgttgcgcgcgcccggggccgcacggccgccgccgcttggtggccgcctgtcacgccggcaggtcatctcgctgacctcccgccgcacgtcctgatgacccaaacaggaagggcacgttcccggaggtgcgtcatggctgatgctcccttgcgacgtccgggcggtcgttgagctgggaaggaaggggcaaggacggcgcaacgcgttgcgaaaggaggcggggcgcccggcttgccgaacaaagagggaggaagcgaggcaggccccagccattgaacggcattactggccttgatctcacgctggctgttgcaggttagacgactgacgctttcatgccgccatgtgtttgacctcaccaggtctatgtcccgaccgtctttgaggtacgtccccctcgtttccgcccgaagtcccccgctgagcttgccttcgtcccctcgaccgtgcagaactacgtcgccggtccgtcttcgcgctttcacgcgcctatggatcgctcgagctgacacggctcgcgtcgtttcacctttgcagacgtcgaggtcgacggcaagaaggtcgagctcgccctttgggataccgctggccaggaagactacgatcggcttcggccgctgtcgtacccggactcgcacgtcatcctcatctgcttctcgatcgactcgcccgactcacttgacaacgtccaggagaaggtgcggccgcgttgtgacgagcttgcgcacggagctagtcggctgacctgtctcacacactccctcaccgacctcgcctgcagtggatctctgaggtcctccatttctgctcgaacctacccatcatcctcgtcggctgcaagaaggacctccggggcgacccccggacaatcgaggagctccgcaagacgtcgcagcggcccgtctcgacgcaggaggttcgtctcgcactcctgcgataagtcagaccactgctgacctctcagcttctctctcgcaggcgcaagcagtcgcccagaagattggcgcccggcgttacattgagtgctcggcccgaaccggcgagggcgttcgcgacgtcttccagacggccacccgggaggctcttgccgtaggtcctctctgcgcccttcagacgcccttgccaacgcccttgccagaagtgactggttgacgccgacatcgccctctgcagtccaagtccaagccgtccaagggcggcaagtcgggcaagagcaagggctgcgtcgtcctgtagagagcctcgaccttctgctcgctgtcttctctcccctcctgctcgctcgctagacgccctcgcaggcctcttgaacggcgctgcctcgtccccccactcgagcccaccgccatctgcccgcccccccctcccccctccccaagactgagagaaacatgatgctgctcttgacaccgctgttaggaaggtgtgttatccatcgttgctttacttgcgccgattgctcttgccgccgccgccgctttcgccgccccggcccgcagcgctaagccctccctcggccctcagcccattgtcgtactggaagcggcccttcttcggcccgctcccaccgccaccgttgccatacgcaccactgctcgcgctcgtcgacaacggcgcagaatcgccgagctcgagcccagagagcagcccgcccccaccaccgccgccatggtggtgaccgccgtcgaaagcgtccgacgaaggccgcttcttgccccgcttgctcgccgccgagccgtcgaacgcaggaccggccgtcgctccaggccgcgaaccccgcgcaccctgggcgtactttgccttgctgctgctgtggccgaacgccgcggccggagcagacgacgaagggaccgttgggggtactgccctggccttgcccttcgaattcgcgcgctgggcgccgctcgacgacggatgacccgaggaacgcgcgtttgcgccgtcagagtcgtcgctgctgtctgcgccgtcgtaggacgatcgctcgccggcctgctcgtcgacgaacgctgccggtcgaagaaagccgccctcggtcgggacgctggtggcaggcataggagccgaggtcgaggcttccggccggggtgcagagccgggcatggcgggaggctctggaggaggagccgacagtttcttcattcgcacggaagagcaaacgatcgtcgacgtcagcgtcaggcggtggacgaatcgacagcggagggtcggctgcggagtgcgagcgagcgcacctcgacgtcccggttgagcccaccatagctccagcgaccgcccttgccgcctccgcttccgcttgcgccagaagtcacagccccgcccgagtggcggccaaggacgaacgggaggtagctctcttcgacttcgagccggccgctgtcaacccctgcgccgccttcaggagcgacttcgccccaggcgtcgtcaacggttgagctcgggaggacccactcgctctcgccgcctgtctgggggacgccgagccagcccttgaccttcttgggcgctgcgcccggcgcgctgccctcagcgctcgtcgatgcggctgctggagcagcggtagcggcagcggcagcggcgacggtcgtcgctgggtccggagcggcctcaggtgtcgaggcgaccttggcggctgcaccgcgctgcatgaacttgagtccgcgcgtccccgaagagaggctcgtccgaccgggcgtaccgagcggccgagccgaggggatcgatgtcggctttggaggggccatgttggagaaagaggcggcagagtcggatggacgtcgacaggtcaatctttgggaggttggtcgtccgtccgcctgcgcgccgctcgtcgtcgtccccttcgaccgtgacctgctccaggacctccttcccgcctctagacacacatagcatgtcggaagcctcgtcaagccgagctgccagccgccggtcgctcttccggccgtgcatcgaccttcatcagggcgtcgtcaagcagattgtcggcggcacgcttgagcatcgcgccgacgcggcagacggcagtgccgacgacggcgggctcaagaccaactttgtgagcgagtgcgtcggcttgcctgcttcttgtagctcgaggaggtgctggccgactcctgtaactggtgggggcgtctgcagtcggttggccccgagcctcagcagcttagctcgacctggccagcctcaccggctgactcccagccgctcgctcacccgacactcgcctccaggaagccgccggcgcactatgcgaccctctatcgcgaacacaaccttctcggcgggcatgtcatcaagctcgggccgaacaacgacgcagcggcaaaggaggcgctcgccgcttggccaggtacgaccgaccgcacgacctcgcgcagcaagggagtcgggacgggtgctgacgctcgtcaaccccttcaggcggtcttcaggtcggcggcgggatcaacgagacgaacgcaaaggagtggcttgacgctggcgcttccaaggtgcgtggcctaaacgccctcctcaacgtcgtccctcttcagctgaccagttgcgccctcactccggccgacaggtgatcgtcacctcatacctcttcccatgtgcgactttctcgctcgaccgcctgcgcgcgcttgccgcgctcgtcggcaaggaccggctcgtcgtcgacgtcagctgccggaagcgcaatggtggctggtgggtcgcgatggacaagtggacgcggatcaccgacctcgaggtgacgaagggtgcgtcaggggacgtacgagcgactctgcgctcgttgactgtctgatgctgacgctcttgtccgatgcgttgccgctcgtagctacactcgagatgctgtccgggtactgcagcgagcttcttgtccatgcggctgacgtcgagggcctctgtcaggggatcgatgaggagctcgtctcccgttcgtcctcgcccttccattgggagttcctcctcttgccgtttcggcctgctgactgcttcgactccgcctctcttacgcagggctcggggagtggacgaccgtcccctgcacgtacgccgggggcgcaaaggccgagtcggacctcgacctcgtctcgcgtctgtcggccggcaaggtcgacctaacgtacggctcgtgcgtctctcctcgccccttctgccctcagccagcgactcgaagctgacttgctcccctccagcgcgctcgacatctttggcggttcgctcgtctcgttcgactcactcgtcgcgaggtcacaagagggcgccgcctcgaacgccgcgcacggcctcgcgctctgagattgatggacatgactaggatagcaggagcaaacaaggttgagggggagaggggtggcaacgattttttgacgagcaatacaggtcgtgaggtggcagtcgttaagaaggggagagggtgggggtgcaaagccttggcaagggagagagcgctaggcggctggagggagctgatcctcctcggggaaggagctgaggacggtcgacggcgtccgaggtcggccgcggccgagcgcttcgtgcccgtcatggtaggtcgggttccgcgtgcggccgcgcgacaggctgcgctcgtaggggctctcagccggcgtcggcaggctcgagagtgagtcgacgcccgccgacgactcggggaagccgtagtcgtccgtgctgttgtctctgcgcgaggcacgcggggtccggccccggctccgcgagcgcgagcgcgagggtgagggcgaaaacgtcggcgcctcggtcgacgcttggacgaggctcttgttgctctgccggcgctggcgcatcggcggcggcggcgacatcgagtagtttggtgtcggcgggaacgactcggttgactcggtcgatgggctgttcatcgagtgcgagccgccgctcgcgtagccggccgacagacggtcgagggaggttgacggccggaagccgccgtcggaccgccggtcagagggcgacgcccggctccggctccggctgccacgaccgcgagcggtcgagcgggcccggctccgtgagcggctgcgcgtcttgacctcctcccagccctggacccactcgctcgtgaggacctcctcgatcgtccagcgggcgccggcatcgctcgagagacagccacggaggacgtcgaggcattcctttccgacttggatctcctcgggcagcgaccagacgccgcggataattttgagctggagccgaggctcaaacgcgtccgagaaggggaagctcccggacgtgacgagaaagtagagcaggacgccgagcgcccagacgtcggatgccggcgtcggcagaactggatgcggcgtcgtcgccggccggatgagctccggcgccgtgtagggcagcgagcctggcgggacccgactggcaccgttagggctggctgagggcgccttctcggccgacggagatcggaccgggaagggcgacgacgcctgacggggctgggtggcgagatgacggcggtggttgccatgaacggggtgaggagccgcctgaagcaagccttcgctaccattggacgccttggtaggcaaggtggcagaccaggtcggcggcgtccccatccgcgagggccgctcaagtgggacggccgtcgaccggatcgagaagccaaagtcggacagccggcagtggtgctgaaaagggtcgcaaaaaatggggtcagcgtcgatcggaagcgctgacggtcacaagacagcggcgcacctcggcgttcaccaagacgttctcgcacttgaggtcgccatggacgatggcggccgagtgaagcgccgaaagtccccgggcgacgtcggtgaagagccggcgggcctcgtcatgcgggaaggccttagtcgagacgccgtcgctagtgctcgtgatctgaacgggcgcggcccggctcgacgagaagagacgtggccggccgcgaccgtagtcgtgctccttgtgcctccggacgacgtcaaagagcgatccgtttggcatgagtggcatgaacaagtagacggcgtcggccgtgatgacgtgccggagaagcggcaggatgtttgggtgtgctggcagcgactcccagagctcgatctcggccttgagctcgtcgagcgtctgcgtcgtctcgggctcgtcgggcgacgtccgcttcgcgcgaagcgagacaatcttgacggcctgcagcggtagcacgcgttcgccggtcgcgccgtcgagcagttcgcgaacgatgccggacgtgcccttgccgagcagcttgccgagcgtctcggtgcagctcggtccgcctgcaggctggccctggtcgtcgggcgagacgatgatcgaggtcgctgccgaggagagggatggcgcgggtgtggcggcggcggccatgatgacactccccggcgggctcgagaaggccgagaggaagctggacgccggcgaccggacggccggcgtcgctgggtccgacggcgagaacggccggtcgacgcttccatccgggagcgagagtcgcgagaggccgagcgagggcgacatcgtccgtgaaatagtcggcggttcggcggaagcaaggcttagagtctgcgtcaggccgctagccgcggctgctgcaggcgggcctagcggccgccggctcatgaagaagtcgttgagcgacgccgccgctccaccggcctgctttgctggcaggccgtcgaaccggggtcgctggtcaactttggacggaccgggcgacggcaggccatcggtacgagcgccggcgacgacggcggcgatggatggcccggccatagcagcagcagcaacagctccctgcggcgtcgccggccggcgctggagcgactcccagggccccttgcgccggctgccgtcgtcgacggtggccgaagccgacctagtcgcgttaggcgaccggtcgcgcttgcatggcgagcttgggtgggcgccgttggcggcgtgcgggatggcagaggtagatgggtcggcggtggttgcgaggtgaggtgggtacgacggacccatccaaacaggaacgtgtggcggcggaggcgagcgaggcgagcgagaacgggtagtgctgctgagctgagagcgaagagcgtgtgctgacggatcgggttatgggcgagatgcaaggtggcggcgaagaggaagaagaggaggaaggaggtcgtcgctcgacggacgaggcaagcaatggctggctgccttccgcggtccctcccgtttcggccgacagccgtgccccttttttcctgcccgccaacccggccggcaggattggacgcccgacgctgacggcaagctcgtccgctcgcatcgatcggcgagagagggatgaattgatctactatagtgcgaagcgagccagccgcaacgagaaaggacggtacgagagggaggcaagaggggaactggcgcgaggccgcaggtaacactacgagataatgaggcgagaggctgggatgggtagaatggatgcaagagacggcgggtgtatctgcagcgcgagctcgtcgggctcgaaaggggtgcttgacggcaaccgctgctgaacgtgggcgtcgaacaggccgtcgccgacggcaggttcggctttacgcgccgacgaggccgtcgaggtcaccgcacctgacgttgccgccacagacgatcgtgccgaggccgttgacgaggctcgcaaacttctcgaggttgttgctggcgggaagtcctggtgctgtcgacgccaccgacgatgaggaggatgcggctggcacgaatgcggatccgacagcggtggcgctcgccgccgaactcgaagggagcgctgctgaagacgacaaggccgagttggacgaaagggcggtcgatgacttgctggcttccgggacggaagcaagagtactggacgatgccgagagtatttgcattgacgtactggccggcgacgctaacgttgatgatggcggcagcggcgtcgaactcgtcgtatgagcggcactctcgtcaaacgtccaggtgccgagtatcatgccctcatcaaacgacgcgaagtgtctgagtaaagcggaatggtcagtgagagcgttccaactcgcctgatgctgcgaagggactgactgaaagaagcttggcgaaagatcgatcataccaaaactgggggaggccaggatcaagtcagtgggcgacgcaatctcacgttcgacctgctttccacgaactcgcaagtcgggcacgagtcgtagaccggggctgatccagtcttgccattatacgagagcgagatgacctggccgcaaatcgagccgtcgccgaactgggccgagttctgtcaagtagccgactagcagacgtcagtgacaggttcgtctgtcaaaggccctacgtcttggaagactggccatcgccaccgtccactcgctgtcctggtggaccgttccgcatgcgccaggagcgccgcccgttgcgtagtatgttactcggcttggtctgtgagaaacaatcgacgacaagggtaaagagtcagctgaagcttgtacctcacaagtcctcacaaagtgctgcgactctttccaacatcttgagggtacgagtgagacccacccaaagcgtttcgatagctggtgcgactgtagcatctcaccgacgaacgcacgccggtcgacagcccgcttctggcccgactgccgctcggcgagtgcggcatgcctgaggcctgctcggtctgaccgagcctcgtcgtgcgagccagcgataacgacagacaagaggaggagtacgctcgccaggatgaggagcttcgcggacgagctgaccatgctggcagtcgacaggagatgagcgagcgggtgaagggcggccggcgaggggtgaggcaggttcaggccgatctgatgggaggcgccgcgaactcgaaggggaggcagacttcaagctgtcgagccaaggagcggcggctgggcaggaggaaggatggcggttgagggctgagctgaaggaaggcgacaggagcgagcgcgacgccggcgtctgcgcgactgcgcgcgcgccacgcgcctgctttcgagccaacactcaggacgtatcgaagaaggcgccctctctcttccgttgcgacgctcaacaagagctgcaggaccgatcgatgcattctcattgcaggtgcggagcgtacacgccagatgggccgccgccaaggggcggggaaggaagtgaagacgaggggacgggcgagcctgagccagcaggcgctcgaagcgaggacgtccttggagcgaaatgagggccacatcatgactgattgaagcgccggaaggctgcgggcgcaaaaaggctttgtcagatcggtcgcgagagccaagagaagacgccggaggcaagacgcactgtagccgaggaatgcgaggtccttgccgcccttgccggcgttgtggtcgaccatcgtgtccatcgggacgccgtcgaggtcctcagtcgggaagtaggacgtgtcggtccccgacttgaggtggggcacgaacggcgcctcgatgtgccggagcgtgttccagtcgacgccgtagaagaactgccggagagagttggtagcacgatcagcttattgtaggttcgcatcaacgagtcagcgtgaacaaacagagtgggccttgatctggttgatgttgagccgctggtcggcgttgttgagcagcctgtgtgagaggagcgagtcgtgtcagctgaccgacgctgacgtgatagatggcagcgggccgagaatcgatgcgcaccgcttgatgaggtcctccgactcgtgcgacaggtggacgtcgtcagggaagtgaaggtctgggcaggcggcaggcgaaagagatcagctgcttgcgcccggcgaggggtgccagacctcttgcgcgaacgtacggtgctgccagtcgatgatcttgcggtacgtatcgtgcgcattctcggagcagaagggcgggtagccgacaaggcactcaaacatgatggcgccgagcgaccaccagtcgcactcgttcgagtagccctgctgaaggaagatttcgggcgcgatatagtctggcgtgccgacggttgagtaggcgagcttgcgccggttggccttccacgtcgcaatcgtgtccttggacgacatggtcagatggatcgagttgacgaggacagaattgcgctccttgccgacgttgctcgcggccgaagtcggcgtgttggccgagccgccgtcgagcaggcgcgcatagtaggacgagtcgtgctgcttctggaagccggtcgagagaccaaagtccgagagcttgatgtggccctgctggtcgattaggatgttgtcgggcttgatgtcgctgggagagcaggcgaagtgggcacatgagtcaagcaggggccagaggaacgcgcatcgagcgagaggggcgcaccggtggataaagccgagcttgtggacggcctcgatcgcgagaatgcactcggccatgtaaaacttggtgacgtcctccgagaaggtgtcgtacttgatgagcctggcgaggcgagagggaaagcggcagtcgtcagtcgccagaacggagcgggcagggagacgagagaggacgcacatggtcatgaggtctccgccagggaggaactccatgatgaggtacaggtactgcgggtcctggaacgaaaagtagagcggcacgacccacggcgagttggactcggccaggacgtcgcgctcggcgcggacgtgtgccagctgcggccgggcgaaggatgcgagcgaggcgtcagaaggggggctgctgcgctcgagcggcgagggctagcttgtcaaaccgacctggtccttcttgaacatctcgctcttcatgagcgtcttcatcgcatagatacgacccgtgtcgatcttttggacgagtcgaacctagaggggcaattgcagcgtcggtaagcttgcgcagagatgtcgagcgacaatgacgacaagcggggcggcggaggcgcacctcgccgaaagcgcccttgccgatgaccttgaccgttcggaagtcgggcaggccgagcttcgtccgcttcatacgcaggaagctacaggttcgagcgagcagtgcgtaagggggtctggtgtgcaaatagaaagtcaccctagtcgcgacgtactttgactcttgccggccgtactggatcagcttgcgctgcttaaggtgatcgggcgtcgtgcggtccgccgcgagcgcgcgctccgtcgcgattcgcctgagagagtggcagaggtcagtcttccaccacaagacaggcgggcgaacggcagagcaggcggacgacagcggggtggtggagggagatggccaggctcgcgcaagctagagccatcgaagctcgtgcgagccctggcggcgaggcgcgaagaagcgctgcctatgtcaaggcgacccacctcccctcagtagcagtcaagggggtggcacctctcaaacgggagaatagaggaagcacagcagggggagagagacaagagggaggaccgaccgctcgcgccgctggaccgcgccctcgacgccgtccttgtaccaaagctcgagtcgcatgcggcactcgttggcctttggccggaggttctcgtacagctccgggtgccggtcaaagaagacgtagtccgccgagcttggatcgacgtccatcccgccgccgccgctggcgacgcggtgcggcgaggacgaggacgaggacgcctggctcgggcgctggtgaggcggggcgtaggctgactgttgatgctgctgctgctgctgctgctgctggtagtagtgctgctgctgctgggctgtcggttgctggcgatactgctgttgctgctgatcgtaggccatcgttgtgactggccggggaaaggtgaaggagcaggaggcgattgcaggtcggagggacgaacgcgagcagaggcgcgccaggccgcccaaagccaaagccaaaggcgcgcgcgcccacgcatgagttgaacattagtggtgcaccagtcctcttaatgctctcgactcgctcgtcaagcctgaccgggccagtcgtcgacgagggttctttggtatcggacgcgagcagttttacagaacgcaggaagaagtagaagaggagggcgcgcgtgagggagagcgaggtttggggcgagccaaggcacagacagaagacggcagagggagaaggggcgctgctggaggaggagggcggtctgacagggtgcgaaggaggagaggcggagtggctttaaggtcccagagaggctgtaggaggcggaaggggagaggaggaggggaggcgcgtggtgggacatgcaaaggggtttgggtggggaggggttggtgcgcgcgtgattctaagggaagagagggctggaaacagagctttagacggaagagggtcagaggagcgtgcagggcggccggtcgttagatcgacttctatggccggcgaggagcgccctcgttctgaggcgactgctgagcctggtggcccatcgtctgggtcgcggcgctcccgccgcccatgccccagagggcgccgagcaggcccttggccgtctcgacgacgccgccagacgatgcggccgctgctgagctcgccttgggcgcctcggtcgccgcctgagcggatgaggaggacgacgccgaggccgactgctgctgctggggctgctgctgctgcccgggcgacgaagggcccgacaaggtcgacgttgctggcggcgagttgaggccgagcgcggcaaaggcgccagatggactcgagccggcggcggcgggaccgttggcgggcgaggtcggcttgcgcgggccgttgctatgcgggagggaggcggccgaggtcgactgcgagctgggcagcgagcgcatcgcaatctgaggaaagaagggagagatagtgggtcagcttttccaggccgaccagactgcgaagctgagaagaacgcaccagcggcgacgagtgcggcgtcgggttggtgctctcggtcgggacgtagtcgccgccgtccgactcattcgacccgccctcgaacggcgtcgaaatctcctggccggccgacgcctcgccaaacgagctgtcaaagccctgcataacctcgcgagcgagcgcggcgttgcgcgcgatccgctcctgctcggccgggtcggcataagacgatgggctccgggccgacgcgctgtcgtcgggcgagggcaccttgtcggcccagtagtcgtcccggcccgaaccgtcgccgggagttgaggcgtccgaggtcggaccaggcgaggccgggcgaggaggcgcgacgctcgccgcggccgtgttgatgctcggcggccgggcagcacgggtgccgccgccggacgcgccgactgcggcggggcccgacgtcggcgggccgttgaagaaggaggcgccgccgtggccggcgttggtcgagggcgaggccggcgggttggtcgacgcgctccgcgattggctcgcacgctcgacgaggctcgacgagctgctgttgcgcgagacggaccggccgcgccggtggcttccctcgtcctcgctgtcggcgccgccgctcggtccggcagagggcgcagcggctcccgaggatgccgacgcaccacccgtcgccgacgacgacgacgaagccggcgcgttaacggcaacgaagccaccctggccgccgacgccgccaccagcgtcgcccttgacgctctcgaccgcgccgacaaggctctgcgcctcggggaagtagctctcgggttttggcgacgaggccgagctgccgccaggcccgttgccggccttcttgaggatcgatcgcccaggctgcttgggctggctcggcgacaacggcggctccgtcaggtccgaggtcgacgaggccgacgaggacgaggtggtcgtgctagatttgtaggccgccggcagagtcggctgcgagttggctttcggtccgccggttggcgtcgtcgtgcccgacgtcggaggggtcgagccgatcgacgcgcctcggcggggaggcctctgcgcagaggcagcagcagcctgggccgcagccaatgggaggtcggttcggctgttgttgggcgacgtgtttgggctcgactcgtagtggttaacggagccgacgcggcttccggtcgactggcggctcaacgagccgcccgaggcaggcgcgcgcgacgagcccttgatcaggtcgtgaaactcgtggtcgtcctcgtcccactgagcctggtcgatcgggctcgggaaatcgtcgtggtcgtgcgagccgccggagccgggcgggccgaggcgcgagctccgctggtggtcagagtcgctgtcgaccgacggcgacgacgacgagacggacgaggccgagccgccggcgccgcccgacgaccggtggagggccgaggacgaggcgttgggcggcataaagacgacggccgggctcggggccggaaacttttcattgctcttgaggagcgtcggcgcaatgtgggcgatcgtgaagtgctcctttgggtcgctcgcctggcgcgtcaggctcggccgctgcgaggtcgacgagacggacgaggcggtcgagcgcatctcgagcacgtcgtcgtcgtccgagtcgtcgtcggacgagcctcggtcggccggccggtcgggagagatggacgtcggctcgtcgagcgagatgcactgctcgacaaacgtgttgaacgagatgtgccgcttctcctgcggcccgcccaagggcgagacggcggccgaggcgcctcctccctcggcaggcaggttgacgcccgactgaccgtgggcgatgccatgctcgacctggccctgaccgaccatcgcgagcgaggggatcgggatccggggcgggctcggccgccgggtcgtccccttgcggacgatgttggtgtccgactttgtgtggaagatacccggccgaggcgagccggccatgctgccgctggcgtcgtcgtcgaggtaggcctcgtcatccgacgtcaggtcgaggttctcgagcacgggcgacgacggcctttggtggatcgtcaggatctcggacagcgtccggtgcttgaggatcggcttcttgccagagtgcaggtcgagcttgtcctcggtcgtcgcaatcttgggcggcggcacggcctcgaccgccgtgtgaagcgggccatagagccaggtgacgtccgagtccttgagcctgggcggacgaaggcagagggaaggcaaaaggtcagacgagggtgcagaccgtgtccttcgggacaggcaaaagaggggttgaaggccggcgaaaagcgatagccctgctgaggtcatgctgacgtcggatggccatcgcacgcccctcctccggagcgccggttacggtcctcctcctccttcttcgtcaaaaaagcccagcctcctctgccggcgtcgcgctctcctcccaaaaagagcgagaaccgaaggctcgaaggaaggaagagagcagatgaagagcgacgcaccaattgagcgtctctgggctgatcgtcttgagcttgttgcgctgcttccaccacgtccgccagctggcgttctccagccggacgccgtttgcaatctcgttcttctttcgcgtcatcgaccgccacgaggcccaaacgtcctcctcggcccagtcgtgagagaggtagtcgacgcagatggacggcagccgcgtctggacgtcggcgtcgtctgggttgtgcgggacggcgccggcgggcgaggcgagcgccggcgcgggcacgtactgggccatgggcggcggcgaggttgggtttaagagggagggaagggtcggggtcttgtccctgtgaagttaggaaccggacgatgggtggtggcgagaccggacgagggcagagggcgaaggctgggtgtggaggcggcggcggcggcggcggagactcgggctgcaaaccagagagggagaggagcgctgtttgaccgaccaggtgactgagccggcggcaggcgggcggcgacgggtgcaagtgtgtgtgcgtgcctcagggattggctggcgtcaggcgagagggagagaagaggacgagaagcggatgctggatcggccctgctgattgagtgagagggtcggagagagagcagggaggaggacggggcaagaagggcgagctcgctgctgctgctcccgccagccagccgctccttcgcgccggcggcggccgcgagactcgcctgctcgatcgccccgcaccccgccggccgaccacccagccagcgtcggcgttcgtcgcaggccagccggcctcgaccaagcatcgtccagacgagcgaccatcgcaagcagcaccagggcgagagggccgagcgagcgagcgagcgactcactagcgacgaccagtcgggagccgcaaagagcgcatacatgcctctcctccctgccgccgcgcacgatccgctgacctggctcacgctcacgcccaccgccgccgctgctgcccgcgtgtgtctcgcggccttcgaccgacgtcgacatccttggccggctcggatcgggctcggcgcttgacgtctttcgtcttctgctgcagacgggagtggaagactgctctgctgcagaggacagcagtcgacagccgtcaggcacccctcgtcggtcgatcatgcccgctcgctcaggtggacagtcgtctctgccgccaagcgcaagacgacgccgagtccacgtccaaggccacctcgtccatctccaggagtactgccaacctcgtccgagtctggtcgtcgacgactggtcgttcgtgccggcccagccgcgcgcagttcaaggcaccgccggacgctcccaaacgctcttcaaacggccgcccgtcttctcatggctccccgcctcgcgccggtcgaggctctgcgctcgcttaggcgagcgaggtgcgcccgaccagactcgagcgagcactgcccttctgtctgctcctgaccagtgacggcctacccctcccgcacctgaccgcctcaacccgtccttcaagagcgacggcctcctcgtctctcgagactgcccctcattcgctctcctcccgtgttccctcctcccgcgttctgcgtgccctccagccgttcacgatgcgcgtcggccccctcctactcggctacctctccatcctcactctcgctcgaggtctgtcctcttgccctcccttcccgctcccgcacctcctgacgcccttgaccacccttcccgtccacatccttcgtccttctgcagctcgtccggttgacatcggccctgtatctacagccgcgcgtgtcgaggccgatctcgcgcctccctcatcctcaagcttcacctcgtgcgtccgtcgtcgtcgtccgctccttttcagcgacctgccgttcgctcgacctcgccgactgacctgctcccgacacgtctcgtccgtctctcgtcgcagggccgtcgcgcttgctcttcctgctgtcgacgtcaacgcagctgccgctgccattggcgatgcgccaagcagcagcagccttgccctccatttgccgccgcccgacctttccccagctgttgtccagctcgtcgactcttctcccccttggctcgactcggccctctccacttcactcaaagcaaccgacaaaggccgcggcagcaagggcggctccaaaggcagcggtagcggcggcaagacgtccaagtcgtcttccccgcctgcgcccaagagcaagaagcccaaagcgaccacgtcgtcgacctctgtaaagtgcatgtccctcggctgcccgtcgacgcaggtccggcaccggaagaagaaggggaagaaaacgccgtgccggaggccggacggatccgtcgagggcggtgttgaggggatggtctacgacgacgacgacgacgacgacgacgacgatgacgacgacagcgacgaggaggaggaggagctgcgcaactgctcgtcgatcgcctggcgtcggacgtcgattcgggctgtcaagctcggcgagatgcggctcggcgttggagcggccgtcgcgctcgctgtatcggcgctcgtgtcggccatgctctaggtcttcggctcggccttcagccctttgtggcgcctttctgcgccttcgggcggtgcctcgatgaaggggtcgacccacgtacctgcgctacctcaaatttttctcctcctcttcctcctcctcctcgtcggctacctcgcaccccaattcctcccgtcccgctccttcacactgcagacgcctgcgctcggacccgctcgcttccaacggaggccctgataatgaccctgtctgcctcgaccggttattctggagcagagtgacgaagttcggcgaagcgaaacggtcatcaaagagggcgggcgaagctgggatcgcggggtcgaggctgaacatgaggggcaaaggcgtgcgccttgcaagaggcataggcgagcatgatcgaggatcgtgcgagacgagaagcgtgattgtcgacgttgatggacgttgatcgacggttgacggttgacggtgaagcgcgagtggcgatgccgacgcggtcgagcaagggccagcggccgggatacaaaggcgatgcgaggatgcaggcggcgaggatgcaggcggcgaggacggccaaggaaagctgggcggaagtaagctggagatcgcggggctcaagcgtgtgcgtcaaggggatgcagcggccggcgcaatcagtcggcggaagcggtcctcggtcaggatctgccgcccgagccgctcaaagatgtcgcgtgcgatggccgaaccgacggtctgctcctctgccgtccatgtcgccgagtcgacgtcggcaagtatgatgagccgcggccgaaggaagtcaatctggtcgtcgagccagtgcggcaggcactcggtgatatcgttaagccggtccgaagcagtcatcggagggccgtggtcgctcgtaaacatgatgcgcgacggcaccccgctgcgtcgaggggccgtccggttgaccttcggtggccgaccagcgttagggtgatggcagctcactgcgtcgaaagcgagcttgaccaagtttgggcagtgcgccctcagcgcaaagggccagtcggcgcctggcacagggccgtgcgaggtgacgtggaggtggagagtctcgagttgccggccaaaggaccggaggccgttgtggagcagccgctcgtcgctgaccgtgtggtcagccaaactgactcgcaatcgaaagtcggccaggctcggcaggcaggttgcggtcaggagggcaggaagcagggttgagtctggctcgattcccgagaagcaattgtcgagccgagagagcgccgacaggttgaataagtcgctcaggccgccatttgggtacgcgcgcgacttatagtgcggcggcagatgaacgtgaagctggcgcaggcgtgtctttgggccgggcgagacggtgagctcgggccagtaggagaggtttgagagcgactcgagattcggcagtgccccaagctcgctccagatcgcaggcaagggcacgccggagtgaatgatgggaggcggctcgtagtggaggcctcgaatgagcgaggccaggttaggcgacgaccggatcgtccggaggaaggcggcttgtcgcgaccagagctcctgcgcaatctctgcacctggaccatctcgtgtcggaccaggaagggcaaggtcgctaaagacgacttgttcgtagaggagtggcgtcccgaccgactgtcgccccaaaccaatcgtcagcccgctgctgcttcgagtgccagaggtcagcgccgagcgggactcacccgccagagctgacagacgagcacgagatcgcggaggatgtcccgattgcggaccatgcgcacccgctcatcgcagaagctggcgccgacgaccggctcgagggcatcctggaggatggagagctgcacctcgttcggcagctgcgagaggaagctatcccggcgcgggccaggaaacagggtcagcgcacggcaccggccgaactcagccgaggactagtgagacggacagcatgctcgtcgagtggccttgacgagagctagcgagcgagctgcatagcgactaagctgagggttggctgagaggtcggctgagggacaaggtcgaggtgggcgggcaggaagctcgctgttgagcggcccgtgtgcttccctctctcagctgctgaaccttctgttatcgctttgaaggtcgaagcacaaggtgtcggccgtcggctgctgtaaaccgagatggcgagtgcgatagctcgagagagaaaatggcggtcgagagcaagcgttccgggcacacgcgaggtcgctgctgcgatcggccgtcgtcctggcgcagcagcagcagcatcatcgatccgctggctgtcgatggcgacctctctctcaacacccaccactcggcagctcacatcggaagaggatcagttgactgactttgcaggaagagggccgacggctgggcgtgcgcgccgaggagcgcttgatggcccgacggccgaagcggccgacgacggcaaaagcgttttctcgcctaagagctgattgaggcttagctctggttggtctctggggcgctattccgcccgatggcagaccatggcgagacacaaccccttcacgccgagtcggccgcggcctcgcacacgcccatgcgtccgccgctggtgctggcctgcgagtctgccaccggcgactcgctggctcgcacaagaaactcactaccgccgagaccctcacccaacgagcaggcccttcgatggccctagctcccttcaaccgccggctatgcgcttacccgaccttgtcctgctactgacactttcatctactgagcctgaaccatggtacggcggcacccgcatgggttggtcctcggtccacacgagtgcacggacgggagtagaaacgaaaagggtacaaaaagggcgaaggcgagggggtggtggaaggggaacctcatccacatcatcccacctcctcgccacatcgtcgacaatgaagttctctgccaccctcgcctccctcgtcctccttgccacttcggccctcgccgcgccgtcgacttcggccgtccctccgcgcatctgtggtcccgacaacctcaagggccccgagcccgaggtcgagcgggtcatgtgcgtcgatcggccctgccccttttttgcttggttctcaggctgacgccccccccctcctacctactcccccaacctcccctccctcactcgccgcacaggatggaacccgagaagcctgcgttcgccatctcggtgccgtccgaggaccccgagccgagagacaagaagaaggagggcgcgaccgagaactcggccgcaagctcatcatcaaagcaggcgaccgatggcaaggcggagtcggcagcagacgaactggtgcgcttcccgccctctctgctgctcgcactgtgccgaggcaaaagagcactcgtgctgacctcagctgcgcccgcttcgtccagtcggaggaggaccagcagctcaagagcgagcttgaaatgctcgtcgagcggctcaaggtccgtcgtcgcgctcgagcactcttccttgcacatctgtcgctgactcctctccctttgccttctgccgactgacaggagtccaactctggcctgtacacgcccgcgctcgagtcgctccggacgctcatccggacgtcgacgagctccatgacatcggtgcccaagcctctcaagttcctgaggcccttctatgcgacgctcgaggatattcggcggacgtggccggcacagcttgcggccgagaaggtgtgccctccctctctgcgactccttcgctcgaggtcgagctcgccactgacgagtgcttgatcgctcgcacgacagaccttgctcgcgtcgatcctttcggtgctggcgatgacctactcggactctggccggcgcgacacgctccactaccggctcatctcgggctcgacagaggacccggggctttggggcaacgagtatgtccggcatctggcggccgagctcggagaggagtacctggcggcctctacagctgccgaggacgacgaggtggcaaagccggccgagacggctgaggagagtaccacggagccggcagagaaggagtcgaccagcgcgacagcaggccccaagtcgggcatcagtgcctcggcgccgacctggccggcagtcgaccggccgacgctgctcgcgctcgcgctcgagatcgtcccgttctttctctcccacaacgccgaggccgacgcggtcgacctgctgctcgagcttgaggctatcgagcgcatcatcccgctcgtcgacaaggacacgtttgcccgcgtctgcctctacatggtctcgtgcgtccttgtcccttgcctctttcacggctcttgccggctgaccgcctgcaccctgcatttctcgcgcgcctcaggtgcgtgtcgctgctcgtgccgccggacgacgtcaagtttctccggaccgcgcaggagatttacgccaagaacagccggtattcggaggcgatgagcctcgcaatccggctcggcgaccgcgatctaatccttcgggcgttcgaggcgccgccaaacatgtgcgtccccatccctgtaccggcttgtgtgccgagcgatggcttacccgtctcgtttctcgggtcaggtcgatgaagcggcagctggcattccagctagcacggtccaacattccaatcgagtgggtgacgccgaccgcggccgagggttcggacgaggagccggccgagctcgacgagacgctcgcggcctgcatctcaaacacccggctgtccgagttcttccgcttttacggccaggagctcgacgtcagcgagccaaagagcctcgaggacgtctacaagagccacctggagaacacccgtccgttgtgcgatgccttgcccttgatgccaccgcagactgacgcccaacgactgcccttccgccaggctcgacgctgtcggtcgactcagcccgggcaaacctcgctggcacgtttgtcaatgcgtttgtcaacgccggctttggcaacgacaagctcatggtcgaggccgaggagggcagcagctggatctacaagaacaaggatcacggtgcgtccatccaaccttcagacgagcccctttcacgagcgtggctgacaaaaccatgtcgtcgcctaggcataatgtcggccgcggcctcgctcggtgtctcgatgctctgggacaccgacgtcggcctctcgcacatcgacaagtacatgtactcgtccgaggagcacatcaagtcgggcgcgatcctcgcgaccgggctcctccacgtcggcgtccggaccgaggtcgacgccgcgtttgccctgctcgccgggcatgtcgagagcccgagcgcgtcgctcaagatctcggctgtcatcgggtgagtcggcggagcttacggtgcccgaggctctggcgcaggtcgactgacccctttccgtctcatcgtcggcagactcggcatggcctatgctggtgcgcaacgcgaagacctgctcgaaacgctcgcacctctgctcgcagacgaggcatcgacgcaggaagtcgcctcaatgacggccctcgccctcggcttcatctttgttgggtccgcgagcggcgaggtcgccgagctcatcctgacggcgatggccgagcggacggacgaccagctgagcgaaaagtggtcgcgcttcatggcgctcggactcggtctgctttacattggtgcgcatccttggctctccccgacctctgatacagacggcaggccgctgacatgaatcctctcgcctttttcaactcgcagagcgtcaggacgcctcggacgcgacggtcgagatcctcaagacgattgcgcacccgatcgccaagcaggcctcgattctcgtcgacatctgtgcctttgccggaacgggcaacgtcctcaaggtccagagcatgctgcaccactgcaacgaccacctcgacaaggagaaggaggacccgacgcaccaggcgattgccgtcctcggcatcgccatggttgcgatgggcgaggacgtcggcgcagagatgagcctgcgccagtttaaccacctcgtgcgtcttcgcccctgcgcatctggcttttctcagctggcatcaatctgactgcttcgctcgcgccgccgccgaccagatgtactacggcgaaccgatcatccgcaaggctgtcccgctcgcgctcggcctgctgtcggcctcgaacccgcagctcagcattctcgacacgctgtcaaagtactcgcacgacaacgacctcgaggtcgcgatgaacgcgatctttgcgatgggtctcatcggcgccggaaccaacaacgcacgtctcgcgcagatgctccggcagctcgccggctattaccagaaggaggccgactgcctatttgtcgtccgcgtcgctcagggcctcgtgcacatgggcaagggcacgatcggcctcaaccccttccacacggaccgctcgcttctctccaagccggcggtcgctggcctgctcgcaacgctcgtcgccttcatcgacgccaagcagtgtgcgtctcttgctgccgcgggccacgggagagctcccgctgacgaaactctctgccggcctgcctgcagtcatcctcgagaagtcgcactggatgatctacttcctcgtctcggctatgtacccgcgcttcttcatcacgctcgacgaggcgctcgagccgatcaaggtgacggcccgggtcggccaggtacgtcgctcactgttggtctttaacgctcgctcgtaaaggctgaccgtgcttcacttcgttgcacgcacaggctgtcgacgtcgtcggacaggccggcaagccgcgaggcatcagcggctttgcgactcaccagacgcccgtccggatcggcgcgaccgagcgggccgagctcggcaccgacgagtactggagctatgctgccgtccttgagggcctcgtcgtcctcaagaagaacgagggtcacacggacgaggagatggagtcgtgacggggatcgtcgacagttagatccatggcctatcaacgatgagcgcagctgctggacttgtgccggccacggcagtcagagagagagaaagagcgcgaaccggagctcggccccggcgtgcctcaaagcagaaatcgggcgccggcacgaagactgttgcctgatcgacgctctctgatcccagctcgacgttggccgagcagcccatcctgagccggcccgacagcaggcgacagtcaaagatcaaacataggtcatggcctcgcggtcgtcggcgagcgcgcgcgcatactcgagtagagcaagcaggtggtacgcctgcatgctctcccagctccacccttcgagggtgagtttccggccgttctcgccgatcgcctgcgcgagatccggccgggcctcaaagaaggcgacgaggtcaaagagacccgagtacgagttttggaccggaacgtagtggtaaaaggggatgagcgcgtccgagaaccactgcagaagcaagcaagagagtatcggcagtcagcaaagaaagtaaggcggcgcggcgggcgaaaactggtgcacctcgggaagacggtcgccttgaaaacgacgctgcccgtgtgcaggagtcgtcggaagcggttgctccagccgctgcagacgacggagcgaccatcagcgtcatcaccacaggtcgcagagagtcaaaccgggacttacttcccatcaacgtccaagaggtagcgatttgccgccgcctcgcctggcgcgcttcgaggggcatagtcgattttggcgccaatctcgtcgcacgtgcagtcgctgaaggaccaaggcaaaggaagacgacagcggtcagcgacagggtgccgagacttgagcagcggtgagcattacctctgctcgcacataatcagccccggtcagctctatgtcgaggtgctccttgacgaggctgccttttgggcgcactgtagtcgaccagccccggccgtctttgctcggggcgagaagcaacagcggagtctctgcctcctcgcgagtcggatgcgagaagcggtggagccgaaagcgctgtgttgcgcgccaatcagtgtttctgtttgcaaaggcgcctgtcgtcccacagtgtgccatgtcagcgcgcgcgacctggtggaatcttgcggcgaaagggggggggggcgcacctctgccacggcctcgccactagagcttcggcaccgtctttcgcgaccaaggtacaaatggagattcgaggcggactcggcccgtcgggacgctaaacaggtcctagctgtgtgcactgcggcagtaggaaaacgtcggggtgaggacgtcctgaaagtccgggttttctagtcagcgttgattgcggcaggccggcccatatgctcgtgaagagagagagagaggaacaggaggcgctcacaagctctggacgaccgtcaaggtagagcgagtgctgctcaagtaggtcggttgtcaagcagtagtccataggcctggaggtcgcatccagaccggtcagctcgctccttcgtcaatcgagtttgcgcactgacgttgacatgagccagaatgaatgacttgctttccccggttcctggcgtgtggaccgggttgcgggtcgcacggccgacgggcgagtctggcccgtaagtcaaagggtagccgtgcgtgcctcgttggacgtcctcgagcgcggcgcgctcctcttccggccagactgcctctcacggacgagcgacacagtcagtttaccgatgaaggatccgcccacaatctgcagcaggtcacacttacgctgattgcgcgcgccgaagtgcccagaggcattccagacgggaaagtttgcgagctgccgcggcttgtcgtctgcgcggagacacgttcgtctgctgtcagccaggcataacgaaagtttgcgaggttcggcggtcgcagacccaccgacgttgaagtacactttgatgtcggggacgaggggaaccaagggagataagagctggacgaaatcatgtgcacgccagtgctgaatcgctttgccgtcgatggaaaacacctcgccgccgctttcggaatcgagcatagcgtccgtcagtacttgaccaactgcgaagagcatcgagaaagtacgcaccgaaagtcgaagctgaccgtctagatgacgccgtcgagccgcttcagacgctcccgcagcatccagcccgggatcgccagtcaggggacgatctgcttgcgcgccttgggcaggatcgccggcggcgggtcaaaggtcgcgaacctgcgggtcgctcgggtcaggcgagctgtcggggaggcaggacagtctgccggtcgacgcaccacttgtcgaagccgagcggcggctccgcagcaaacatctgcggtactgaacgacgtcctcggcgagcgtctcaagacgtcggccgcttgccgccgcgccttgatcttggcagcctgttcagatcgggtagggtcagtcgacagctcgtgcgagcgaggcgaaggtgaggccgtacctcgatcaggagctcgaccggatgctgctcgagcacgtcgctcggctcgagcggcggcaggacgacgacgccgtttaccgtctcctcgagcccgagttcaggccaaccaagaaggggctccagtcggggcgaaaaccgaggcgagagggattccgaccggaacgtagcccgaaggcaggccagaggcgagcgtccagctgacaaccgcgagcccgagcaggacgagcagcgagcggagggaacggcgaccaaccctgatccttggcaagaaggatcgagcgctctggtttccgccaggctggcgcacgtcggaaggcatcccgcgaagtgaggaaggacaagtggcaccgtcggtcgatggagtgcgtcgtcgttgcaagcaggcccgatttccccgacctggccgcttcagtcgttcagcacgtcgttgcggcgcagtagtctcagcgattaagcaccctgcgttgccgtcgcttttataaattcgcttgcacgacctcgactactgtcgagctgaacgtcagaaagcttacgcccgaaggacctttgagttcgaaacgcgacattcatcgccttccaaactttgccacccgtcgccggctcaatgttggcaactttctcgcccttccgttccacccccccccctctacgacagagagtcgagcactagcgtcggcatcgagaggctgtgaccggtgtcaatgagtcgacgcctggaggaagcaggccgagccgtcgtcggcaagcttgcaagctgccctctgcgccgtagccggtgatatgcaacccagagagcgcagaggacggcgagaccgagcgcggtcgcacctagcacgctggccgaaagacgaaatctgccccaatatttcagacggaggtttctttcttcagccgcagacgaaggatgaaaggcgggagagaggcgacgcacgggctgagagtcgctgtcgacagctggatgctctggggagagcggaagaggttgcccgggtcgtactgcgccttgctcgcttagaggcgcgcgtagtggtcgccgtagaggaggcgatagtggcccgtcttgacaatctcgtcgtcgacgtaggccggatctgtaagagaaggaagccgcaagggtgggacgtcaatcatggagggccaaaggggaagcacgcgcgcacgcgatgacgcacagacacctcgtgggctaggctcgatggcgctcgccatgtccttgatgagggcgagacattgtccgggaacggcaagtagttgtcctctggccgccatttggcgtaaaactcccaggtgatgagggacgaccggtggttgaaggccgtctcgtcgcaggcgacccggccgatggccgagtggcggccgccgagacagggcgaaaggacaaaccagtcgagtcggctggcgacgtctgttgccagggcatcgtgcagcgacagcgtgtactcaaaaagcgctcgagctcggccggcgagtatggctcgtaggtggtcagaaatttggcatagaagttgacgtgctcggggttgacgtgcggccctcgtcggtcgatggccgaccagtcgccgcggacgttgtgcgtatcgccgccggcgtcgatgggtaggcaagcgcaagcggctcgacccaggccgagaggcggcggtagtagggcgcggaggcctcgtgccaggccagcgagctcgacgagaggacgacgtcaccgtcggtagcgaggcctgcctgcaggcaagcgacccgatccaaacgctgtgtgacagtcaccgtcatgacagcgagggggtagcccgaaaggaggaggatgagcaggtggacgtgggagggcggcggagagcggcgcgactgctggcaacctcaagagcgtcgctcggtctcctgctgacggtgggctaccgaagaccgttttccgaccggcagcgtgttcccgacaacgcagactcgtcggtcaggctccctactagtcgaccttccgtagacggaccgggccgaggtgcgtcgacgcccgctgcgagcgagagatcgacaacctggccaagaacggcgcgcgcagcgctcggcgccagcacaggtcagcgaggaagcctcctcctgtcgttggccgttgaccgcctcctcccctgtccaacctgcccttagaccagatgcgactcctgccgctcgcgctgcagcatcctcgacggaccgtccgccgtcaccgctcagcgctttcactcatcctactcgttgccatcgcactctggctgctcggcttctggccttcgctcagcactgcgccgggcgagcggccgtacacactggtcctcggctcggacggttcaaaggtccacgcagtcttgttcgatccaccatccgagccctctgcagcagatggcaagctcggcctcctccgtgagaacgaggtcggcgagcgaccgtcctggctgtgcgcgcatccgaccctgcccgaccgagcatacggcgtactcgagcgcgccgacgcccgggccggtcgcctggttgccttgcgtctcggagggccgagctggtggcggcgacggggtcacgtcagagttcttgacgaggtcgcttctggaggccaggagccgtgtgtagagggcttctcccagctcgaccgtctcggcgcccgcttggctgaccttctgccggtcgacccgctccgctcctgtctgtgccagtgcccactgcgccgttaccccggacggctctcatctcgtcgtcgccaactatggttcgggcaccgtcgtcttccagccgctcggccctctgggccttttcctcgactcggcggcggtacataccctgccgcgtccagacgcgttcgcaccgggccgcaacccaacccggcagaaggaggcgcacccccaccagattattcccctcggacgcgacgtctgggtcgtcgatcttgggaacgactgtctttggcgttaccggacgatccgggagcgggccgacagctgggccgtcggtaaggttgagctcgagcgggctctcgaaggcgcgccggcgggcgacgggtggcggcatgccgtctttggaccctctggtgcgtcgacaggccgccatctctacacccgtcgcatcggctgacatagcctgtgcatgctcgtcgcaggccgcgacatatatatcctgaccgaactgtcgctcgaggtccttcattaccgactttcgaccttaaggcggccgctgcttatctcccggacggccctcggccctctcaagtcatcaacgtcggccgcgtccggggccgagctgctgtacctgccgcctgctactgacgactcatctggagccctgctcgcgagtacaagagagtcgacgccagccggtgaggcagacgatctgctgtggctcccgctcggcgaggatggggccgtcatcgccaacgagcttgagcggctgcaaccgagtacaggccagagcctccgcggagcgactgtgaccgccgacgggctctatctctttgccgctggcgaggcgagtctcttctggccgtcgccgtaactcaatgccaatgctgaccgccgccggatctccctctcttagactgacggctccctcaccgtctggggccggagccctgctggtccttggcgagaagtcgcgccgcctctcaccggcctcgaccggccgacgtcggtgcttgtagtggagtgatacgcatgcgcgcccttggatgggcttcatcatcaatcttgccgctcttgcgcagacaacgtcgggccgggtcggcagacgggctttggggggtcgcccttgctggcctttgcacgtcgcgccgcatatccttctccgacgacgaactgtcgtcctgcgtccttgcgtcaattgaccaaggtcgagcgccttacactggaatgcgtcttgagagggcggcgggcgggtcgaacgaaaccgggaggtcacgccccggcgctcgctggtagtgcaggtagcctgccgtcgcctcggcagggcgacgacacccaacgccatctctctcccctcgccatgctcggccggtccaagtcgctcaagaagacggcctcgctctcgccgatgcccatcgccgaggagggtccgccgccgccactgccactgccgtccagcccatcggcggccggccggtcgtcgtcgcctgctccgagcgcgaccagccgccggctcggcgagacgctctatgccccgaccgggctcgtcaacggtgcgtccgctacagtacgccgcacggtcgggacgaaagctgacggtcgtctctcgtccacccagatggcaacacgtgcttcctcaacagcgtctttcagtcggtgcgtcgagcgcgccgcgagcgggaccgacgtctggctgtgacgtcgtcaccgtcgtcggccgcacttccgagctgaccagaggttcctgtcgatgtccgggcttcttcaggtcatccacacgccgccactcaattcgctcctgacgccaaacgacatgcacgaggcgaacgcgctgcccttctcgccggcccaaacgcttgcgattgaccgccagcggtgccccgccctcatgtcggagcgcaacgagcacctcgacctgatgcccctcgcagcgagctttgtcgaggccgccggccggagctggcggaccgagctcaagcctctcgaaaaggtcaccgaccgcaaaggccagggtctcaagtaagttggcattcgtttgcttgcgaccggctttggtcggtggctggcatcgcctttgcgttgggctcaagctgacctctgtgctggtcacgctcaggacgttcctctacaacatgtcgaagaagcacgaccagtatggcgacgtacatcccagctcgaatcggcactcgagctgcttttgaggctgacgtcttgcctgttcgcctcgcagtacgaccagcaagactcgcacgagtttctccgacacatgctcgacagcatccggatggaagaagtcgacgtccgtggccgtcgctatcacctgcgcttcttggcccaaaccctgacgtgttgtcaccccgttcttgccccttctgcaggtcatcaagcggctgaaggccaacaggctcgagccgagtccagagacggcctcgatcacttcgtcggtgagcgaagcgacctcggccgcctcgtcgatccccgtcccgcacatcgagccaccagctcagcgaccgccaccaacagccgacacgcccgctgaggagcgcgacgacctcgtctcgttcgttgatctgctgtttggcggccgaatggcgagcatgatcgtctgcggcacctgcaagtcggtcagccacacgtacgaggactttatggacctcagcatgagcatgcccggcgaggtgccaaaggagaaaaaggtgcagctcgaccggtccgagtcgcgcttctcacctgcgactgactctctcgcccccatctcacgcctccagcgcgaccggctgcgctcgatggcgtccaagctccgggccaagctgtccaagccagataactttgacaacgattcgtcggccgtcgcttcggatgaagacgacgacgggccgccgacggacgaccacgctcgctcgctgtctgctcgccgcttgacgtcgacggacgaagggcccaaacgagtaccgggcgggcggcggatgacggtcgaccaggcgtctggcccaccttcgagcagcggcgttggccggcgcaattcgatcctctctgcctttggcggcggacgcaagaagagcgtctcgcgccgctcatcggccgctcagtccgaggccattagcctcgcctcgcgaccgccgtcccccggtaactctgaggacggcgacttcccaatctcgcctgccgcgacgccgttctcgacctcggccctccttgctcagcccgatccgacctcgcccgaggccaagtttcccaagctgcggcagagccaggcccagtatatctcgcagatcctcggcggcccatcgctgagcgcgagcacagtccagcatctgcggtcgctcagcatgtcgatgccggcaccaccgtcgccggcatcgtccgacggcacgtctggcgccttgccacctctgccaggcagtccgggcccgggcgtcgcggcctcgcccatgtcggtcggccacaacggcctgatgaacgcactccggcagtttaccagcgttgaggtactcgacggcgacaacgctttcgcctgcaagaagtgctggcggttcgaccacccccgccgagacggcaagccctggcggcggggcggcgagcggcccgacgactcggacgacgacgacgagcaggatgacgcagcgcgtgcggagtcaggcaccggcggcaccgttgacggcagcggcggcggtgatcagacgctcgagtcgattcaagacgtcgacgacgacgtcgaagaggccgcgcacgcccgcggggccgacatccaggccctggctgatcttcacctcaacggggatgagccaccgacggcggccgacctcgtcaagctcgacaccaagctcgctgagatcgatggtttcccggcgcggacgatcgaatcgccggcggtagccaagactgttatcgacgacgagtcggtcccgacggcgacctttggcggtccgccgcatcctcacggaccgcagcacgagattccgtccatcatcgagacacccttctcgccgaccgaggagaagctagcaccggtcatgcccgttatggctgcccggcccgcggccgacggctcgtcgctcaacccaccgccacggtcgtcccgagcccaccagttgaccaagacgcagagccgcggcaagtcgtacatgaagcactcgaatccagagttccaggtcgtcgaggactcggactcggacaactcggacgcctcgtcgattggcgggaccgacgacgaggcgacgacggccgcaagcggggcgacgacgcccggcagcaaatcgtcgccggccaagggcccaaagagtgtcatgcgccgggccttcaagcgctacctgattgtcaacccaccgccgatcctcgtcttccacctgaagcgcttcgagcagatctttggcggcaagggcttctcgcccttcggcggcttcaccacaagtgcgtctgctttccacccttctgtggcttccactcgtgtcgctgacgagattgcccgaccgctccccttcgcagatttcaagaagctcgacagctacgtctctttcccgctcacggtcgacatcgcgcctttcttcgcgccagcgcgcgttggcgcgccagcaacgtcgaccaacctctcggccaaagctaagaagcacgtgactgacattcccgactcggtcaactatgagctctcggccatcgtcgtccacctcgggagcatgggcggaggccactacagtgcgtccgcgcctgctgctggtctgtcggatccgacttgctgacctcgccctcctcacgccagtctcctatgtcctatcgtcccctctcgcccctccgcctccgcatcacgactcgtcctcctctgtcccgccctctccttcggctgccgagttggccggctcggctccggcccgtggtcagaagacgagcgtctcgcaagagtccttcggctcggcccgttcgtcaagcgtctctcggaccaagacgcccatttcgtcgttggccgacagtcaagacccccgcgtctggttctactgctccgacacgatcgtcaagcaggtctcggtcgacgaggttctccgtgcccgggcctacctcctcttctaccagcgcgtgatctgagcccttcaaggcgattctttctcaaacgacttggccttctgttcctacaacgcatctctgcatctcatcaccttcgtcgcacgcagtcgtctctttgtcgtctcgctcgccctgagctcttcatggcgccggatcgcctttgtacccttccctcagaacgcatcgcaaaaccctgctttccatctccttctgatctgatcgaccttgcactgcaacaatcaggaatggtctgggaggagacgacatgcgatcgcgccgcagagcaaatccagaggcccggccatcactcagcaaagaggaggccaggcaggagcaggttgcttgctgcggtcaaaggcgtgcactggcttagatgaggagctgtgacgggcaaaggcgagcaaagcagagcagtcagcatcggctcggaagcagctacccgcgccagcggcaaacggaccttctcaatctgggccttgatcgaggtgatctgggcattgagctcgcgagcctcgttggtcgtgaccgaggcggcgatgacggggcgcgagacgccgcaggcccggccgagcgccgtcttggacggcaggaagacgtaggggacgttcttgtcctcgcacaggagcgggaggtgcaggagaatctcgatcggctcggtgtcggccgtcatgatgatgaactcgcactgtcgtttatcggcaggtgaaattggcgtcagcggtgcgcggcagtgagcggtgaagaaggtcatgacgcacaataccgcggttgagcgtcttggtcgactcgttggctcccttcttgagctgcttgaagtgcgacgcctgctggaccaggtcgaggatctgcggggggcgagtcgggagaacgtcagccctggacggtgtcagccgacacatgagcgacagccaagggcgcacctgattggtgagggccgcgtcggcgagagggaaggccttggggttcggggtcgacatgctggacggtgtggagggtgtgggctgcggagggcacaaggcgagagagcacaaggtcagtcctggtcgtccacctttgatgctttccgcacaagccagacaacacaatactggaacgcactgtaagaagaggctgtgtgtgggagctcactactgatggatcacggctcagggtcaagggaggagggctggttgtcgggaggtcggccaggggcagggcagttttcgagcggcctggtcggctgtcgagctagcctgccgtcctgcatcgacgagcctcggccgggcgcgtcgctctcactccctccgatgacccgacgacgaccactcttgccttcgctccgcctcgcccgtcattcggtccgcactcattcgtcgcgcaatgtctgctgctgctgcctcatcgtcttccaagggtcccaactttgaccgcgtcagtcggcgggctttgcttcagaggccgctaactcagtctgcgcgggctgacctgtcatctcccgacctcagccgctcgtcctgttcggcccgagcgggaccggcaagtcgacgctcctcaagaagctctttgacgagttccccggccagtttggattttcggtctcgcgtgcgtagccggcgcacctcgcggcgagagctgcccttgcccgactgacacctgactgcttccctgctgttgctgctcgatcagacacgacgcggtcgcctcgagcaggcgaggagaacggcgtcgcgtaccactttaccgaccagcctggcttcgaggcgctcatcgaacagagtgccttcatcgagcacgccgagttctcgggcaactgctatggcacgagtgccaaggccgtcgccgactttgagggtagcggcaagcgctgcctgctcgacatcgacacgcaggtccgtccacgctctgttgtcacatttgccatcgataggactgtcgtgccaagattgctatcgtcagagagctgacctccgtctttcgtccgtctgctcgctcggccgtggtcgccttgtagggcgtcaagctcatcaaggccaaccaccctcagctcaatcccgtcttcctcttcatctcgccgccgtcgtttgcctcgcttcgcgagcggctgacctctcgcggaactgaggtgcgtccgcttgattggacgcgatccgcgccgatgctcgactggccccgcaagtcataagcctgacgcacctgacgcgattgagctcttctgtagaccgaggagtcgatcaccgcccgtctcaaggccgcgcactctgagctcgcctacgcggccgagccgaacagcgcggacgtcgtgctcgtcaacgacgatctcgagcgggcgtacgcgctcttccggtcggtcgcgctcggccaggaggtcacggacgacgagcttccggccaactgaaccctagatcgtacagtagaggccgagcgaggctgcgtctcttgatgctgcaccgtcagccgcgttgggaccgtttgcgtgcgtcgcccttgatttgccgtctatgggcgcgcattgaggacagtcgcaaagctcgagtgaacggttcgggctgcagggttgatcattataagagcgagcaaacgtctgccagcgtgttggcctccctcgcgctcgtgcactggcgcttgcggcaccggtgaggcgaggagagcgcccgacgtcagccttgtcgagcaacgtcgacctcgccatccgcaaccgctcccgaccacaaacggcatccttgcagtggctctgctcgcaccttgtacacgcggagagtcggtcctctctctggatctagcgtgcgccactctagcacgagcatcgcacgcgcaccaacagctccttcgaaacaggctcgcctcgaccgacgcgcccgagcagccgctgcgtccgtcttgcccgctgcaccccgcctagctcatggaggacgctgcaccagccttgtcggagggcatccatccggcgaaggatattgcctttggctcggtgaggcgccaaatagcttctgacgaccgagcgagagcagggctgactcggtcgccggcgcatgccctcccccttctagattgcaggctccctgtccaaggtattcgagcaccctttcgatctctgtacgtgctgcttgtcatcttgcctcagacatccaaattctcgtccggtcgagatggggtgccgtccctctctcgaggcttgcatacagagctgatgctggctcgcccttcctctcttcgcgtcctccaggcaaggtccggtgcgtgctgcttagtcaagacgtcctaggcttgagctcaacctggccgcattatgagctctgacctgccttttcctcgtctgcagcctccagtcgcagcctccagacaaggccctacgcttcaccggccctctcgactgcttccagcagacatggagcaaagagggtctgcgagggctgtaccgagtgcgtggccctacccactcctttgctcgacagactcgtgtgccggccgctcatcactcgttggcgcgcatgcttttctctccttcagggcctgtcagcgcccatctttggcgcggcggtcgagaatgcctcgctcttcttcatctacaaccgcatccaagaggccatcctctctgcgcgcggcgccggcgccaacctcgacaaggccgaggcgactgtcggagagctcgcgctcagtgcggccggggcgggcgcggtctcaagcttcctgctgtgggtgttccaaggtccggcccatgcgctgctgaccgggggggggagctgacgatcggttttactggcagcacaccgatagagctcgtcaaggtcaagatgcaagtgaccttgctcacacgcgagggactcatgggcggcccggcttcagcgagcacgactgcggccctctcggccgccaaacctaactttgccaacctgcccggaccgtgggcgatcatcaagcagacggtcgcgtcgcacggcatgcgaggactctggcttggccagtctgggacgctgcttcgcgagacgggcggctcgtccgcctggttcaccgcctttgaggtcgtcagccgggcgttcatgcgtctccgggagcgcgagcgcgggttggccgagggcgagctcaccaaggccgatctcaaggcctgggagctttgcgtcgccggagcggccgcgggcatgtcgtacaacagtaaatgccagcttctgatgcccgctcggcaacatgcacgaggctgactctcaatgcctgtctcccttcgcagtcgtcctctttccggccgacacgatcaagagcgcaatgcagacgagagctgagctcaggcccgaccagaagcacggcctctcctttgcaggcacggccaaggagatctacgcggcccgtggcctgcgcggcctctacgccgggtgcgctcctccttctcgatctgcttgcttgcggccccatcgctgaccgaatgcgatcgacctgcatccaggtgcggcatcaccgtcgctcgcgctgcacccagcagcgccctcatctttcttctttacgagaagatggtcgctcactttggctgaggcgcgggaagagaagaagcctagaatctagtgtaggattgcgagataataaacgttgtatcgacccggcggagaaagcgagcagtctgcttggcgagaaaagcaagagcccgggacggcacgtcgtgtcggagagcgcttcctccttgaaactggcctcctccagatgcaaagcaatcgccgggtgtgttttgcagccagcacagcgcaggcgccaacgattgatgcaatcatttcaacatggcacgttcaagtggtacatcaaggtttgccgtctcctctgcaccggccggaaaaggttcatcacgaaagacaacgcctactgcgggggcgacatgctgcacgggagacaggtaggtcagcgagggcgagagaagagcagacgaaggcgacgtcagcactcacgcgatggacatcaggagcttgagcgacgtgatggcgggcagcaagccgtcgaacgccgtgttcgggatgaatgagaggactgtttgccgcagacgaagcaggtcagtgaagcaggctcgatgtgggtttgtgagcgcactcacggaacgggtacgcctcatccagccggcggttctccatgctcttcgcaatctcgcgcagcttggatgccaggtcctcggacactgcgtcgttgttcagccgatcgaaaaggatgtcgagcttggccggcatccgctgcagctcctgcgcaatctggggctgttgcaaagaaggcggccgagtgcacagacgtcagccgctgaagacgcatgcttcgaggcaaccaggtcgaaagtgactcacgctgggcggcggcagcgagcgcacatactcaaacaggaactgaatctgctcaaagattgggatattggccgcggggatgtgcgttcggtccccggccgggtgcttaggctcgacgacgggcgcgggcggcggtggcggcggcgctgccttcgcaacaggcggctgctggaagccggccggagccgccggcgagggctgcgagcccggcggaggagcgtaccgtccagggtcggcagaagggggtgcgggtgcgggcgcctgcatgccaatcgtcgaaggaacgccaccggccagcggcgaggtgacacgcggcggaggcgcccgaccggcgggcggaggcgcaggtcgtcctgccgggggatgtgcagcccggggaggcggaggagtcgctgccgggggagcgggccgcatgttcgagcctgcgcgtgggggaggcggcggcggcgcagtggtctgagggccgctcggccgtcgctcgctctcgtcaccgtcgctggctagccttcgaccgggcctgacggtcgcatcctgctcgtgcgcgcttctggtccaccgactccgtccctgtctgcgattccatgcccttcccttcgacgactgctctgccgttagacagatgcgaatgcggtgcagacgggcgcggatgagtcgagactcgctggaggcggccatgcatcgagctggacggaggatgacgtcagagcactttggagggaggggaccaccgcggcctcaccaaactgtttcgccccgtttaacgcccctctggtcgaactggccgttgccaccgccggctgcgccaccggcgttgcgttgccggtcgacaagggcgtcaaattggcgctgctcctctgccctcgcgcgactatcattgtcgatcggcgtcaggtcaagcgagatgcttggctgagcaatggaaggcggcgcaagcgacgacgccgcgatggagggagtcgaggttgactgagtcgagaagtcggccgacatgggcgacgtcgacggcggcgggagggacgagcctgggggcgtgttgagtgtcgctcgcgagcggagaagcgcccacgacgttgggttctcgtgcgtcgctcggtctgacagaagttagtaagcgaggtgtgagtcagcccataggacatcggaagtggccgaagtatagcacggccggcgcaccaagcgagtccatttctgaccctagccgagagccgccgagcgactgaggctcatccggcgcaaagccgacgtcgggcacattactgttgtcgccgtttgcgcgggcgtcatcgcgtgcgaagccgacgtactgctcgggcggcggccggtcgtcatactttggcaccgggaagggcttgcggaacggctggtcggcggccgaccaattgccgcctccctgcgcgccgccgctctgaggtgtcgacaggaagccgttctgctgggccggtgctggtggtcgagagcctaaaggaggctgcccactgccggccaagggtggcaacgggtggcggatggggtcattgctgtggagtgtcagcgcttggtagagttggatcttgcggaggatctgcttctggtcgcctctggagtcggcatcggagccataagtcagccagaggccggaaaatttgcctcaggatggcctgcggacaggtacggactcgtggctcgccatgtcgccctgcatgcgccctgcgccaatggccgcgccggtgaggccgccaatgaggccggctgtcgtgcttccgatcgccgtcttaaccaggccggtcttgaaacgaaggaggagcgggatggagatgactgtccctgcggccgcgccgattgagaggtagcgcgacgtccggccaaagccctcggagatggcgtcgatgtcctggcggttgataaggccggcgtcgatgaagggctgagcgacctcggccgtcggctgctggcgcttcttgtcaaacgcagggccggacatgcgaggaacgacgaggagctgaagttggatgtgtagggtgtgctgatggaggtagtgagctgctagatgcgatgtcgaggagagggttaagctagtggtgatggcgagaggtagggcagggcgatcaagcagggatggccgacggctcggaggcggaactgctgcatgcatgacgaggcccctttcggcacgggcacgggcgcgggaccagccagcccccacgtcaggccctttagtagcagccatgacggtggacaggggagaaaggcataaatggcttgggctgtccggagctgctcgttcttgaggggggtcgtaaaggtatctgcgtcgtggccgctgcgcgcatcgacctcggtgtcatcggccgtcgtgtctgctcttgctcttgccgccgggatgccaccttcagcggtaccggtcagcaagcgtctgcctgttgtagctctcgcccctgagcgggccagagtagtagctcgaggtgtcgcgcgtaccgctgaggccggcgacaccaccaaaattgaggtagccccggttgaaggtcacgctctgagccgctgcaggcgcacaagtgacgcccaggacgaccggcaccagacgcagttgatctacaggcgcgagaagtgggattactggtcagcgcccacttgagccgaagaagtaggcctacggagcgcacctccttgcccttgctgcgctgcgtcggcgtccactgacgagcgcactcggcatggatggctgcaaggggccgctgcgagaccatcagtcagcgaaaaggggtcggaaagccgaagacgggacgacacacccctgccgcacccgccggcaacgagacagaagtggaggccggtctcgccggtgccaaactcatcgtagcagaccgggcagtctgcatcggccacatcgcaacgcgtcaccaaagcattgtcagccacgcacgagagtattgtcacccatgccggcgaacagggactgaccgtcgccctcctctggcatcctcttctccggcaggccgcctgcgcccttggcgttcataaacggatcgtactcaggctcgcggctgagcgtcgcgcggtaggtcgaccgtacggtatctgctgcgagcgcgttctgctgagggctctgcggggcgttggcgaagagctcggcgagctcggtggagagcagcgagcgctggaaccctgtggacgcgacagagaggtcagcttgagacggagttccgagaggagagatgagacgcacagagcaagccggcctctggcgtgtgcagaacctgcgaaggcggctcttgtcagtcaagaagctgggcgagaaatggtcggtgacgacggtggttctgagcatgacctgacacgagggcacggtcgacgagaaggagtcagcttcggtgctcagcgcaagctgaaggccacagtgagatgaaactgacaaagacgatgtgcttgcacgtgccattcttctagccgtcggggtaatcgcatgtcggggtgagggcgacggtaatcgtatagacgttgccggttgagccgagtaccttgaagatctcgtagagactgtctgggtggcgctcgcggtcgctgccccattgtgtggaaggacggaagtcagcgacaggtcgcgacggcctgatcatcacaggttcgccgacgcacacgaggtacatccgctgcgagcggacgcggtcgactaaagtggaagccacccaagagacgtcagctgcgctcacaatagagcttgaagaacgggcgaaagggaaagggacaaacgacgctggaggactgctacccgcgccttcttgcgttcgcggtgcagccgcttctcttcggacgcctgcaagatggagagccggtcagctcgctagaagagaggcgcgtgcgcgaattaacaccagcgcacagagggctgacttgaccgggtcgaagggaggtgagatgatgtcaggaggcaagtcgacaggaacaggccggcgcgtcaaagggagctcgcgcagcacgaggcccgccctttcgaaggaagggaggtcgaagctcgcttcccctcgacgaccagcttgctcaaggtcaagtactctgttggcgcccttcccgagctgctgctaacttcagaacggtagagcgtccgagcaatcgtccttgttgaaccaaggtccgccgctgacgcgcatcgagctcgacggcttgccccgaccgcggtcatgctgacccggcttcgactcgctcgtagctcaccttgcgccgccctgcccatcaacgcccattgataaactcaattttcgcccgccagggcgacttcacatgtcaagcgcccttcaaactggcccaacagcgccgacccgggatcagacctcgaacgcttgtccttgtcgacaagcgaacgccaaagagggcgtccacggcctcggcggcgagccggcaagcgacggccgcaacctcggacgggcaccgcgtgtgcccgtctcagttggggttggcccgctgacctgcctcattgcgaagcttgcccatatatctactgccgccgcactagcagcagaggtgtgcttcgagcccgaatcgtctgcgtcgcctgggcgtcgccagatcgaccaaccagctccgcactccccttcgacgcgccgacgggccaggtcatgcgccgttctccgaggccgggttcttcgtttaggctcactttcgaggctgatcggatcccggcttctgctgggccggagccctcaagttcatctcacccttttcggttcagtcgcgtccttgcttgcacccttcgcgagcagagcccggtctggcaatctgggcccgagggctcttgaagatgtggtctgtcctgtccttgctcgctcttccgcccgtctcccatccagctcatcccttgccttgctcgcttcgccatgcttgtcaccagcctcctcgcctcatccctcctcctcctcgccccgagtgcgctggccgccccggtcgaaccccgagcaggtgccatcatcgtccttgacgccgccgccgagaaggccctcgttcctatggccaactttgctcggtgcgttatcctcggctcgaatacgagagcctgcccagagctaacgaacccgtctgttctttgtagcgcctcgtactgctcggcggcaagcgtcaagagttggtcgtgcggaggtcagtccatctggtcgttagatcagactgtgcgactgcttacagtctgctctcacctgccacagctgcttgcgccgcggcaccgggcgtcaagggtatcgcctcgggcggcaacgacgacctcatccccggctggtttgtggccttcgatccggctcagaaggcgatcatagtcgcgcaccaagggaccaacccatcctccttgtgcgtcgattgctctttcgtgtatgatgtcgttcgagacactgatcacgtcaagttcaacccgagcagcctgtcggttctcaccgacatcgttctcagccctggcgttctgcgcgaggagctattccctggtaagtagtccgcttgagtaccctctgcaacagctgctgacaatgagacgcgatgcgtaggctctctcgctgctggcgtcaaggtccacactggtgcgttcatattgttgggcgtcgctggcgaccccgtaagcgtcatggctgactcgcgtcttcatcttctcccattgaaaggcttcatgaccgtccaggcgctcactgcgtccaagattctcgccgcggtcaagttgggcgtcaagacgtacgggacaagccgggtaatcacgaccggtcactcgctcggcgcggccatctcctccctcgacgccgtctatctcaagctggcggacccttctcttcaggtctcatacgtgggctttggtcagccacgggtcggcaacgacggctttgcccgcttccacaagtcggtcgttcccgactcgcggcacgtcaccaacaagaacgacccggtccctcgcctacccggcacgttcctcggcttctcgcagcttgacggcgaggtctggatcgtgagtcgctcgggctgtttgtccagaattgccagtctctgacgtttacgcggcacctgcaacaggacggcagcactgtcaaatcctgctctggcttcgacaaccctgactgcgccatcagcgtctcgcctctcaagttcaatgtccttgaccacggagggtgcgtcaaagcgtctctccctctcactggcaccttttaaatggctgatcggttactcctccactttcagaccattctttagcatctcgatgggaccgctccagtgcacggcctgagagctctgcacttgacgcccttttgtgaaccatcacgtcccctgctcactgtctgtctttttctctttatcctcttgggcttcctcggatctctgtctcgtactccactttgtcatctctctctctttgtcccctacgatgcttgttgctccttgccctctgcacacagcaaaccttgccaacctcgatcgcagctactgcacttcctgccgacagtctgtgtttccttgggcatgcgcatcgtctatgacaggtcggcgagcttctcgcccttgaccttgctctcagccgccaccttgaactggccgccgacctcgcaatcagtcagcgtcgccttctcgccgacgacgcagcgctgggcgaggatgcagttctcgatcttggcgctgcaggagagcgaggaggtggggaggtcagccatctgataggggtcaggaatcagggagaaacgcacccgtccccaacgacgacaaagtccatgatgacgcagccgttgatgcggacattgcggccgatcacacagtgccgaccgacgacgctcttcttgacgttggtccgctcgccgaccttggttgaaaagccgacaatcgagtcggtcgaaacctgcgccttggggtcaatcagacccggcgtcactggcggcgttaccagctgagcctgagccgcaatcgcgtgggccttgaggaactgggagaaggaagacgacagcgagtgtcagctctcgctcgagagctgagaaacgaaagccggacgcgcacctggcggttgagctcaaagtaggtcggaatgtggttggcgcgggcgacaaacccatcgtcgagccggtggatgatcagcccgcacgagaccttccagcgctcgcggccgtcgccgcctctaatcaggtcggcgtcggcatcctcgtcatcgtcgtcatcgtcgtcccttcgccgagaggcgggcgaaagtcggaggtcgtccatcgactctgagagcgcgccgccgggaccgccaccattcgacggaccgctgttccctgctgatgccgttccggcggccgtggccgccgaggaggctttgggaacagacgcaagctcggccggatcgatcgttgacgggcacgagactgtcggcggcagatgcgaggtcgagtgctgaaaggcgagcgcctgcgggtccttcgctggattgagtgctgggggcagaagcaagagcgcggccgatcagccagccgttcagcagatcgaggggagtacaaagaacgcacacggtgcccacttcttcgcgagccgcgtctggtagccgcccttgacgagccacggtacgagctcctcacgcacgctctcgatctgcgggtaggccgcgagaaggtcgagtacgctgtgcttgaagatgtagacgtgactgtcaagcagacccttggtgagcgtcaccttcgggaatcttgaaggatcgagcgaggaaggagagggtcagtcacggcatctacagcatccgcagcgagaagtgatcatgaggagaaatagggatgagtaagaattatcagaaccgtcctccggacgatccggagggtgctgccacatgtgggtctcttcatcaccgggcgacgaaggccgctccatgtcccgagggaggcaagagcgaccaacgaccccgatatcgaagtacaaggatgaaagatgtgttcatcaggagagggattgagacagttaggtgaacggcccgacatgcgccaggtccgacttgcgctttaagcgcaacgctgctcgctacgcccgctcaggtgcaaggcaagccgaggagcgcaagtcccggcctggtctcgaagatcgacgccatgtcgatcttgagagagacgaatagacgtactttcgaagcatcgacagccggacgacgacgtcgtcctcggtgtcctcgagttcgcgcacaaagaggagcgtgcctccgcggtcgcctttcctcctcggtcgcgcaccctcgacggtcgatgcgctcactaccggaggcatcgccgccgccgccggcgtcggcagtcccggctcgtagccgacgaggatccgctcgggcccgtccttgccgagctcggcgcgctcgtagaagagcgaggtgacggttgcgttgggtcgcgagcggtgggcgtcgagcaagtcggcgagcgcaagcgacggcggcgggacaaagtcgcatgggaggagaatgaagtcagtctgtaagagtgagattggattgagacctgtcagcgctcgagagcgactcaggctcggctccgaccatgagggctgaccgagatgaggtccttgtgctgacgaaggaggttggccgtctgccgacgaacgaccgcaccctcctcatcttgatcctcgcttccgctattgctaccttctcccccaccgccgttcgtctgaccctggctgtcgccaccttcaccgaccgcagctccgccgagaccagccgactcgccgataccgccaacaccggccccgcctgaaggaaaggcggcgtcgacggcgacgaggtcgatccgcatagctccggtcccgtcaggcgtttggctctgccggagcgactgcagatgatgcgagagcgccgggtggtatgtcgccggcgtgaggatcaggacgtctagagacgcaagcggcaggcagggcggtcgttcggcaacggcaatgatagggcgtcagtcagcattcgcgctgaatgttagatggctctaccagctcgtagaccgccacgctttggacagcatcgtcgcactggcgtgtcatgcagctcggcgccagccaaaggcggacaggacgactaacctaggatgccggcctgctcgacccagctgaggacggccgagatcatcggctcgttgccgatggggagcagggccttgcagaggttgtccttgccagtgagcggaaagaggctgggcattcggcgcgaagatgatgaaaaagcaaaaggtcagcttagtagcttgacaaggagcaccacggtcggacagagctcgtccgcccgagcggtcagagggcaaacgaggacgcacgcagagccatggccggcaaggatgacggcctgaaactcggccaacctggaagggttctgtgagaacatgcttggcaacgaaagtgtgaagcaagttggaagtgcgggtcgtagttcgaaagcggtcctgtcgttgtcgacgagcttgagtcgagaggcgacttggtgaaagcgtccgaccgtggttcggcggcagagctgcctcgcgcagcaggagagtcagcccgccttcgacctcgaccgctgacgtcgggcaggcctggcacgaggtagcgagcgagaggtcgaggctgccgatcaacaggctgctactgaatgtcaggactcagctcgctctgccggagatgtggctatgaaggccatcgactgggccagcgcccgccctgggcgcgatcaagacgcgtcgcgcgagctccgtcgtcctcccgaccgccagcatcgactctcgatctggtctcgcccgggagctacatcctcaatctcatcttcaggctaggcctcccacgtgtcaggtcgatatgttcgacaaggatctccaagagctcagctcgctctcggccaggcagaaggcccttctccggcgcggtccgtctgctctcgctcccaccttccacctcgttctcacatcgtcgctgacgactccatgcgcctgtgctggtccctgcgacattgtacagccggtcttcagacgcccgcagaggtcctactcccggcaccggacgctctcctccgctcgctcgctccaacctcggcgggcgacgctcgcgtccttgcagccgccgttgccgagggcgtcgctccacagccggcccagctagggtcgatcctccgcgctcgacgagcggccgaggcagaagcggcgtcgaagggcaagggcaaggctagagggccgccgatgacgctggccgatggcgaacggctgacgctcggcgatggggccctcgaccgcctctttggcaacgggctggcgctcgacggcagcttgaccgagatcgtcggcgagaggttcgtcttcctttcttcgctgtttttctatgcctcagaagctaattcctatgtctcctcacccactcctgtctcctccggttcttgcttattcttccgcccctgctgctctccgacacgcgcagctcggctggcaagacgcagtttgccctcgctttcaccgttcgagcagcgctccttcctccgcccgtcagctggccgtcagccgcacctcttggcgccaatccatctgcgggcccatcctcgtcggcagctccttcccagcacgttcatccgccagtagcctcgcacgccatctatctctcgtccgagggccacctcccgacctcgcgacttatctcgctcctccctccctcgcacgccgacaacccggccgacgtcctctcgcgcatccactttctagccgccaacgacgccgaggcggtcgaccacgtcctgtcgtacctcgtcccgtcactccttgcccggctccgcgccgcccgcgagccaggggtcgttcggctccttgtcctcgactcgctcgcagccgtcctccgctcgtccttcggtcaggaccggcaggcgctcgccaaacgatccgaagcgattggactgatcgccgataagctcaagagtctcggtgtccagcacggtttcgctatcgttgtcctcaatcaggtcgccgacgtcttcggtccgaacccatggctcgtccgctcgccggccttcggctcgccctcgtacggctcgcctgccggctcacaaggcggacaatttttcccctcgccggccgcatcgcaacaatatccgccagatttgtcgctagcgaccagactcggcgacgagggaggccagtcgacgctcccgtttgttgccgccgccgcctcctacatcccgtcaccttcgatggcctaccgcgaccagacgcgctacttttccggctcgtcagcgaccttgaccaaggaggctgcgctcggtcttgtctgggccaacgccgtctcgagtcgagtcatgctccgccggaccgagcgcttcctcccgatcgccgttcgagggctcgcgagcggccaggctgaggagggcgagggcgaccggctccggctgcggcagatgacgaccgtcttttcgccatcggccgaggccggaaagagcgagtcgtacctcgtccagacgagtcgggtcgtcagcgtccggacgatcaaagacctcgacggcccagcctctgacactcctatgattaagcggccgcgagccctcgacgaggatgaggacggcgaccctaagaagcggtcgacaaccgaagccgagcttgagcgggcgaaggctgcgcgcagggcagccgtccttggcttgctgccagcgtcgtcgttcgcaccggtctcgtcgtcagcagcatcagagagggggatgacatgagctcttcgcccggacctgatccccttgccacatccgctcaacagaaagggctgacggcgcaaggcacatcaatcgtagccggctccactacgctgctttgcccggcgcggcttgaagtgcttcttgaccgccttgccgttgtcgcgccggtcgtcggtcccgagggcgaccatgcgcgtctgattgccgagcttctcgacgtcattgcccgtgtcgtcgacgaggttgtggacattgtagtgcctcggccgcgagaagccctcggagccctcgatccggctcgacgcgccctttgtccgggggtggttcgtgtgctttgcctcgagctggacattgtcttcgcggaagaagcccttgtcgagcccacgcgcaatctgcgtcaggccgagcgacggccggttgtcggccttggcggcgatcgatgaccaaacgtgcgccttctccggctcgggctcgggcgcgaggtcgatcgggttgccggcctcgtcgaccgtcgggtcctcgaggctctcgccattggcaccgaccttgggcgccccgcccgctgctgcgggcttaacgtgggcgtccgagcccttgccgtagcgcgtcgtcggcgccttcttgcggttctcgagctcaatttgctcgacggcgttggcgtgcgtctcctcgttgaagacgtgggcgttcttgcccggcggagggtggcagtagagcagcttggcgttgacgtaatccttgaggacgtagcgcgccgagcgcgacgtgtcgggcagaccaaacgacgcccgcgtgtagcctcgagcgatcgcataggccgagaggaagtcttcgccgccgaccttgccggtgccgccgtcctcgacggggataacctcgatcgagatggcatacgtaccgtcgaggatctcctttgggatccgccggcagacgagctcgatcgggccagagtactcgcgcatctggtcgatcggcaggacaccgtcgcagacgagctcggccttggtcgtcgcaaactggggaaaaacgagaccggggcagtcgcagagcgtgatctggggcgtgaagggcagcgtctggaagtgcttggtctttccgggcgtcgccgagacggagacgcgcttcgagccgagcagggcgttgatcgttgaagacttgccgacgttggggtagccgacgaggccgacaacgagctttgacggcggcgacgggtgcatctccgtgacaaagtctgcaagacgagagggagggcgcgaggaaggctgtgaactgctgcgctcggggatcggaacatggctccaacagagcacgcaccgttcaggttaggcgcctcgctctcaaacagctgctccagctcgagcacactcagcacccgcgtccgctcttcgtagccctcctgctcgcgctgctcgtcccgctcgagatcgatcgcctccttttcgacctccttctgctccttgtgaccccgcggctggggcacgacctcgatctcctcctcgctcgagtcgtcctcagagccggacgaagcctccgctgcggcctcctcggccagaagcgcctgttgctcggccagcgccgcagcctcttgcagggctgaggcgttcagggccgagaagaaggcatagcggatgccgaccgagtcaaagtggtcggcccattgccgcctgtagaaacgggaaggggtcgtcaccttcagctcggaacgacaaaaccgtctgccgctcggccagacgcaccgctgatcgagcgtcaggagatcactcttgttgataagcagcagcgccttgcgcttgttgccctcgtcgctccccttgtcgatgatcttgccctcggcgtcgagcgaccgaacatagtcttcgaggtcggacgatcggaagttttcggggttccgggcgtcgacaatctggacaatcaggtgcgagcgctcgaggacccgccaaagctggcgccagacctcaagattgcgctcgaacggggtgaggaggaggtcgtgtacatccgacagcctgggttaagagcagagcgacagccaaacgcgtcagagctgcattcgcccgcggagagtctggcgcgcgcagctgggacgtactctgcgagactccggcgccactcgaggaaggcgtcgcgctcgttccgctcgagctggcggggggtcatctctttgctccactttggccggcgcgggacgagcagccggctcttcatcagcgcatgctgctgccggacctgctgctcctcgtgcgacgagagcagatgcgggttgggctggtcgtttgagaggtcgaccgacgacgtcggggccgtgatgatcttgacattctggcgctctgtcagccccggcgcagcagcgggagagaggtggaagaagagctcggtcagcacggcgaacgacgactcctgtcgaccgccgcgtcgagtgagagctatgccagcagcagtgagacggacgaaccggccgtgaagtcggtcgctgcgagctgggcggtattgaggaactcgtcgaggtcgccctcctgcgtcaccgaccgcagccggccttcgtcgtccttgaagtgctgctcggagacgagccggagccgacgggcaggacgagagccggacggtcagcgagctgactatgcaccggaggttggcaccttgagcaggccaccgcaagtaatgagctgagcaacgtacgagcagctcatccgggaccgtggcggcgaccttaatgcggttcttgatgatggcccggccgaggccgttggcgtccttcttcgagcgaggaggctagcaaggcggcggggcaaagagaacgtcagttttcggttttgaggaggtctggactcgcctcgcctgggacggaccatgttgcggaggagggcgggggtgtcgggtgtgggtgtcgagtgttcgagccgaggggccagccgaatttgctgagcttggcctgccattaggaaagcgatttaggattaggtaagtcgcttacaacccgccgcgcgcagtcacctcccgcctgcccgtccgcccgcctgctgctgatctcgagtcaggtcgagccagcaccccttgatccacctctctacacaatcagcaacgcccatcgcacacacacgcacgcctctctctccttaaatactcagctccaactcgccatgggccaggagcgccgcgtctaccttcagggccgcaaggtctacggctgcaagctctgccggacccacctgtgctcggtcgagaacctcatgtccaaggtgcgaccctctcttcgccttgctgccagctggtcgggcttatataactgacgcagccttctctgcacgctggccttacctctagaagttcaatgggcagcacggccaaggtgagttcggtggatcccgtctcgctcgggcctgggggaaggcggctggtaaccgtaccgcccgcctcggctcggcacccaacgagcctgccgaacgcccttctcgtcgtgcaagccgcaagagctgacattgctgccgttctcaagcctttctcttccacacgtgcctcaacgtcgtctgtgggccgcccgaggaccggtcgatgacgactggcctccacacggtccgcgacctccgctgcgtacgctgcaacggctaccttggctggaaatacgtgagttctctcccaatctcggcttacacagctccttatcgctgactagccttttcctggcttcttcaggacaaggcttacgagccgtcgcagaagtacaaggtgcgagccgcccctctcctctccgggccgcgctagctgcgcgccgcgccgcctcctgctcaaccaatcaatcgaaccctgccgctgaccgtcccccttcccctctcaccgcaggagaaccactacatcctcgaacgcaagctcctcacagacgtcacgcccgtcagtcccctttcgtcgccgatcaagccgccgggcggctcgccctcgaatggctcgtccgccgcgatgagcttctcgtcatcgccttccgccctctcgactggaggaggatcgagccgcaacggccatgcgcggacggcttcgggctcgacggcaacgagtatgagcaccgaggaggaggaggaggatgaggacgactgagcagtcggcctcgatcgctccaccttcctccggccgcctcaggtcaatcatctcgacggctccgcagcgcgtgccgcatgcagacctcagcgaagacgtcagtgcggctctcctagttgtggcagccggcttcgtccttctctgaggcctcttgacggcagccatcatagcctgtgacgtcgacagccgagctgcgtccagcgcgcccgaatacctctgccctttcctgctctcctccaaccacagaccacattatcagctactcatccagcccgccactttctcctcctcgctccgtgctcaattgttgtacgccccgatccgtctctgcccttttccacccctgcttgccgtcccgaccgcgctcgcagccccatccaccttacactctcccctatccttcctcagctgtcaccctccactccgcgttcctgaatcacgccctccgctcacctctctctctccgtccgaccgtgttgtaccacagctttttcctcgcgtcgctttcacgggcacccgtcgcagcttcggatccggtccaaatgaacgggaagccagcgacagactttagcctttacactcttccgcttctttgtgacttcctcgacaatatttgtcactgacgtctgactgactcgagcagctgatgggcacatatagagcgggccgtccgtttctctctcatcgatctctgacatcatgatgcccgccctgctgcacgcctcccttctcctgctctgcgccctccccttgcttgccctcccagcgtcggccgagctccgacaaagtccgactggcgtcgagtacgcgccgcgctttcaaccgtcgagcaacggttgtacattgcgctgcccgccggccgtcggcagcttcgggctgagcgacgagtccgaggttggaacggcgacgttctgcttctacgagcaagttgggaccagccggctagcttgtgacaggactcgcccagctgaccctgtcgcttctccagctcttacagcttcttctgccgctacgactcgcagactggcacgcgccttagccagtcgtcatcgctctgcccgctcctctcagactatatctgcaccatcacgccgaaccgacggaagctttcgccactcgagagcgtcatacgagcccggcagcttaagtcgcccaggcagcggtcggcagacgtaaagtgaggcgtgctgcgacagttccgttcggtcgacgctggagtgagggcaaaagttgatcacactgcctacctgctccttgaggatggcaggtaatcgtcccagtcatcgcctctcgcccgaacttctctgctttcacgttcagtttgatcttgatttcatgcagtctatatctgactgcatcgttgccagtcgtcaggggattgcgctcctcgtttgcggccggcctcttgcgcccagcaaagggcagtcaaacacaccccgctttcctgcgactgcattttcgtttcgctctgaaagagcactctgtgctgtcctcgaagtggtaagaaggacagcaagcgccttggtgttgcaagtggcgccggagggtctggagagtaggctttccgcggccccgcagcgcgaccaagaacgtcagcggcagcagcacctcatttcgccgtctctccggcgacaacagccatcttccgcctttcgcctcttgtcgctggggctcccctgcgcacagtatggcctcctcgtcgggcttttcgactcgcaacgcctactatctccgcatctctcgcgacacggtcctttcgctctacacctacgtcgagcagccgtacgtcaactggatgaccgactacacgctacaggtccgtcgctcgggcaggtctctttgcagagtgctcagctgatgctcggcttggcccgatgactctcgcagaaggtcctcatggcactccggccgctgtacgtctgactgcagctctcgcggcgatgaagctgctgccggccgagtggccttaaccgacagctgacgctcgctcctcttcgtcccgcagcatccggcccaagctcgcgctcgaggcaggccttgacaagaaggccgccagcatgcccgaggtcattattggtggtgtgtgccctgaagctgcatatgttgtctcgccggagctaggtcgaggggagtagctcggagtagcttgaggaggcagaaggcacgcagctcgagttcgcccttggtgccgtcgcgcgcagggcccgcatcaccatctgtccgtcatcggttgaccatagaaggtggcaggaggccaggacaagcgcgaaccttaaaagacgctgggtcgggggccatcgtcgagccttgagctcgggctgacgcggcatcctcggccgcctcgcccgcagatgactttcgcttctgcttcttcctccggccaaactcgaacgaccggcacgtcgtcctcctcaaggaccggcgctacatttcgcgaccgcttcctggccatcccgcggctgccgacgagcttgaggctgagcaggaggacgcagcaccgtcgccgccggtgacgcgcatgggcgagggccgagggcgcaaacgcggccgcgacgagtcggaacgagtcatgtcggacgagccagaaggtatgccttctggtcagcttcacatcttcacgagccgactgacgaccgcccttgtgcgtccgttgcaggcccgattgacatcaagccggaagacgagggccggtcgacgatcgacgagatcctggcttcaacatccgctggcgcgccagagcgagacgtcccgcgcggccagggcctatttgactatggcgaggaggagccagacgaggactacaagccagaggctgacggcccgtccgacgcgatgttgctcggcatcgacgccgaggagcaggaggagaagaaggccaagccgctgctcgagatgcgctaccagggttggtcttccagactcgtcactactctcgacccagggctgatatcggttccctcgcaggcttctccatctactcgtcgcagctggtcatcattgtcgagccctatccattgccggccgcgaccaacccgctgctccgccggtcgtcctcagtctcggtcccgccaacgcctcggcctcgagcgtcgtcgaccttctcgacctcaacctcaggcacgcgccgaacgtttgaccggacgccctcagcctcgccatggccctcccggccctcggccaactcacgctctggcactccagccggcgagcccctcttccggccgatgacgccgctcggcgatgaggacgccgaggaggagcagaggcgcgacgaggagcgccaacggcgctgggcctcgtggcgcgatcgcagcctcagcgtcctcccctctcgggaggagagcgtggcgcctccagagagcgcgaagaccgacaacgacgacgctgaccaggacacgaccggcggcctggccagcggcggcatgacaaacctcacgcaatcgctcatgaacgtcggcggccggcaaggtgtcgacgaaggcgaagactagccgcccactaacaactaccccagagcaaaagccctgtctgggtcgcgctatccttgcgtcgcgcgtcggctatcaatcggcactcaagcgcgcctcaccctccagtctgcgcttgacttgggctcggcgtcgccacgcgcgcgcaaaacgggcccgatccgccatcaaccttctcgagactcgccgattggtgcgggatgcgcctctgctgttcgcgctgcccttctcgccacgccgtcctctgcgatacactgctgcagtgaggcttggcctcggcgatgcggtgaggcctcgacacggccctcgcttcgaccagggaggcgctgctccttaggaaagtagcatgattttgacgaaggggtaaaagaggtactgaaggcgggaagcaaagcggtcaaagagcagtcgacgcgattgagatcgaggcctaaagggaacaatccaagacgaacggtctactgctgctgttgctgcttggctgcccagcgccgagggttgtactggcgcgacttgatgacctcttcgagcggcgagagggcgcgcttagtaacgtagccaggagacttgtcggccgttgagggcagctagggtcgtccgtctgaccgacggtgacatcgccggtgtccgtgtctaaacgcaggccgggtcgcttttatatgaggtttgaaaaggctggccaggtcagtcgcagagggtcgtgagtctggtcagactgacggactagatgaaattgttacgtcgccttcgaaattcgtccctccctttggaccgaattagggcacgccgcctacggaggacgggcaggtaatgatgcagcctttgacgccggttgaggctacgaaccgcttgacgtactcgacgccgctggggccctgcctgagctcggccgaggcgagagaggcaacggcaagaacggaggcgtcaagggtggcgagcctggccgtcgagagaagagcatggcagcattgacggtaggcgaggctggggggcgagaggctcctcctcctcctcctcctccccccgtcctcccagggcgccgtcttctcaaactatcgttggaggggtggtccgattggttccatctattgggtagcgtgggtgtgaagcggacggaaaattctacaacggaaggggtgtgcgagagaaaggctgcgatgcagggagggttgagggcgtgaagatgaccgcacgcgggcaggagatgagggtatctaggcggagaccgtcttgtggtgcttggcgaggcactggtcgacgcggttggcgtcaccgaccggcgggagcggcttgccctgctggacggcccacttgcggaaatgagcagagtagtcggtgatgattcctgcgcgacagaggtggattagcattgaacagaacggcgtggactgtactgggcactcaccgtcaacgccaagctcctcgacgaggtgctcgagcaggttgaggccgttgaccgtccagacggcgacccgaagcccgagctcgtgcgccttgtcgaccatctcggccgtcgcaaagccagcaaagcccttgacggccgggtcagcgggagagcccgtctcgagcgcggcgggcgagaggtagtcggcgccaatcgagtgggcggcgagggcgacgcgctcgccggtcgagttgccggcaaagtcgtcaaagttgaggtcgagccagagcgagcggccggggctgagcgggcgcagtctgagagtcagtacccgtaaagctggatcgtatgtcgaggtaggaggaggagcacgcacagatggtaggacgagttggccaggacgccgtcgacggccggatagagggttgagtcgtcgacaagtgccgacgtccggagcgtcggggcgacctccttgctgtaggtgagcgcccgccaagcaaaggactgatgcggatgaacaaatcgtggtcagtttggctcaagctcctcgtcgtaagaagcgatgctatcgttcgcacctggtgcgtgacgcggtcgatgaagtcggctccccgggcggtgaggatcggcaggagggtgtcgacaaagtcctcggccgaccgggtctggttcgttacctcggggttgatctttgtctccaagttatagaggacactggtttcgtgagaggacgagtcagagaggtgcattgggttgcggaagggcccaggacgacgcacggctcgtcggtcgcgcagtcgacaaagtcaaaaagctcctcgacggtcgagagcgtcgagccgggcgcggtcagcgcgagcggatatccaacgagacgaatgctgccgcagtctgcaagaaaaggtgggacaaaggatcagcgattgattgatgtgggcgaaggtctcgagatggtagagaagcaccgagcgtcttgacctgcgcaagcgtgaggttggcgacgttctggccgacatacgggaacatctcgtcgccggcaaaggcagcggctgtgtcctggcacttttcggcaacgatgacctcgtcgtgccagacgatcagatgcccgtccttggtgaggccgacgtcaaactcgagcgtcgtgacgcccgtcttgagagcgtcggcaaacgtcggcaggacagcctcgacgacctcgccccggccgccccggtgggcctgaaggtcaaagtacctgcacaaaggagggcgtcagcaaggaattaaaggcgagctcgagatcaacgaaggggggccgacttgaggtactcccagcggcggctgagcgaggaggagacgctgcgctcgaccgggacggcggaggcgagcgttgcgaggctgaggagggcggcggcagcgagcggggcgaccatggtgagtagggctggaggagggagtgactgtgggcggccatcctttcattcctccctcgcaacctcctttgaggccgtgcgtgcgttggtggctcgacccagcttgccgagccaagcaagaaagatcggtcgggcggcgatggccgacgacaaaaaacagaggccgacaacacgttcgcccgcgcacgcctacgtttgcccttgcgctagctagcatgcaagctgcgtatgcttacaggagctggcacgtgcaggcgaggccattgcggacggctccgggctgaccggcagttcgagacggacgtgcgctttatgccctgacctctgacgctcgacgtcgactcgcatcgcatcacttggtctcgcctgcatgcccgtcgtcctcgccgcccttgttggcgccccggcccttgcgcttcgcacccttagcccgggccttccagtccttggtgaggacgcccttgacctcctcccatttggcctgcatgacggcctcatcctcgccatcgggccgccagaagccgccgcagcccgtgttgaagcgcttctcgttctcgagcacaaggagcgagcgcgactgctgcttcggacccttggccgcctcgacctcggtcagatggaggtccgagaagaagtagggcgtcgcggcgtcgggcctgaagggctgcttgccgagcggaagcgagctcggccgaggagcggcggcgactggcgcaaacggcatcgaggcggcgagcccaggcgcaaaggcccgcgacgggtggacaaaggccccagtcgagcctgattgatgctgaggctgaaacggcgggggcgatcgccgagtgggcagagcggccgtcagcgtcgggtcctcgtcgtcgtcgatctcaatgtcgagcccgccgaggagcgagaaggtcggggctgcgatgagatgagaagggcggtcagtcctgcgagcgacactgagcaagtaaaggcgggacagcgcaccttcggtcgtccggggtgcaaacatcgccttgagctggccgacgtcggtcttcttgcgtgccggtccctcggccgcctcctcatcgatctcgttctccgacgagtcgtcatcatcccgcgcgcctccccggatacggaggacgtcgccgtcctcagtcgtcgccgactgctcctcggccgcgagccgcttgacgtcctgtgccagctcccagtcacgaagttccttcatcgcctgctggaccgggtcgagattgacctccttttcctcgtcgtcgtcagccgagtcggccatgacggtgtcgagatcgggctcgggcgacggcgaaggcgggactgggaccgaggcgtcaaacgtcacttgcttcttgatcggcgagacgggagccgcaggcgcaacgacggccggctttgtcttgctcgctgccttcgctgccttgacagcagggggcgcaacgaccgtgaccggcgccggtggaccaggagcctcggtctcgctctccgagtcgtcgtaagcccaggccggtaggctcggcgtcgccgccttcgtcaccggagccgcagactcgtcctcgtcgtcgataaacgagacggcgctgagtttctctggcccgtcgtcgcccgccgcaccctcgtcgtcagcgccaccgtcgccaaagagggaggcaaagacgccgagcccgcgctgcttttcggccgcaacgagcgccgccagctcgggatcgacggcgacggccgccttcttgcccttgggaggcttgacattgacgccggcggcgacgacgggggcggcaggaagcgcccctcgcgcggtcggccggacctggctgggctgcgaaggcgcacgcagggatgggtccgttggacccgtcgtctccattgacggcggcgcgggcacgtatttggcgttgccagggaccgcagccggtttcgagacggcagcaatagcagggcgaggtaccgcacggggcgtgagcgccgttacgacggcggccagtttgggtgcgggggcgccaggtgccggtaccggggcgacggccaagtgaggcggcaggtctttgcctgccagcgccgccgaggcgtcggccgtgtcaaagagtgaattcggcgcgctctcgccctctggaagcagtgtcgggaagtcgtcgtcgtccttgtcgtcgcttgcttcgatgtcgctcggcaggtcctcgtcctcctcggccgcaaagagcgcatcagccgcgtccgtcgtcggcccgagcgacggccagttgtcctcgccctcgtcgtcgtcgtcggcgtcggccgcctcgtcctctcgccttacctcatcggcccggatctggtcgacgtgctcctcgcccgacgagagcgaccgcaggacctcctttagccgctcgcgccggccgacgacaacctcctctgcccgaccgtccgccgcgacccacgtcaccttgccggtcgtctcgtcccgctctgtgcagacccagatggccccctcggcgccgatgtccatccccgggtcgagcatgtcgcccgcaagatggacgcgatcgtatcgcctcgggtcgatgacgaccttccgtgctcggctcggcgcagagtcggagcgcttgcccgtcttcttcttcttgactgcgagcggcttgccgtccttgtcaaacttgggcagggctgctgctgcggcggcggaagcggccttggctttcgctgccgacgaggacgacgaggcgccgaaggacgcggtcggcaccggcagggtcggccgggggatcgggtgcaacggtctgaccagcatcggtcggacgaggtgctggagaggcgtcaggtgccagtgcttgagacgagcggagcagagtgcgagagcggcgtcagcgcacggcgggcgggcgaacgtcggcaaggtcagcgaaaggcctaccttcttgtcggcagcacttttggcatcgattggctccatccgctttgcctcaacgccatggacgcccttccccaagcgccgcttcttgctcgccttcttcttgtccccgaccggcgccgtcgtcgtcgcgccgtcctcgtcgcgcgcgcgcttgagcccggcccgctcaagcgccagccggtcggtgacgggcggccgggcctcgccgagccggagcacgcacgatttccaggtcgcgccagagaggagggacaggcagcgggcgacctggggcgccgtcgtcgagagcgtgacgaaggcgaacgtccttgggaagcctggcgggatggtcgagcggcatcgaaggcggacggtgtcagtcgtcggcatgctctcggtctcgtacgtggcaggagcaagcgaaggccaagcttatccatgcgggcagagcgaggcgagctgaccattaccgtcgagcccgacgccgtcgacggcctcgaccgcgccgaagctcgcgaaccgctgccggaggtcggcgtgggtgatggccgggttcgaaaggccagagatgtggagccgtttcgtgatggctggcgccggtggcttggcaggcttggacgacgacgacgatgaggcggcaaccatgactgctgctggcgcgcttgaacgtctttcctgaggtcgacagcgagggaggaggggctgagttggtgcgcctgcgcggcggcctccctcgaatttaggcgggcgaggggcaaagctagggttactcagcaggcacgccgcgggactgaagctccgaccctcgtgcgtcttgcctacaacctcgctcgacctcatctccacctttgtgcctctcccgcgatccctctaccttcctgcagcgaacagaggcatctcggccagacccgatcctcaagcttcggacgacctttcgaccttcatcggcccatcacctgccctctcctatcgcgctcgcctagtcaccggacaccgccacctctctcagggaagcgccctctcgtcgctccccctacgctgctcgtccgtcgaccgtagcccttcgctcgccgctcactctcacgcctcctagcggcgtgaaaggaacggaaagcgtcgtctcggtctcctcgggcgatcacctacaaaagcgcatgagtggaccgcccgatccgaggctgcatcatgccttcctgctcggatctaagaaggagttccgccggttgctcgctctgcccgtctcgggcggcggcggcaaccagacgagctcgggtaactacggcggcggtagtggcggcggaggaccttcgagcgggccgaggagctggtcgaacaacagctcgctcgcccacttcggccagcagcgccagcagcagggctcgcccgagcgcctcgacgtcaacgcccgagacggtctcggccggaccatcctccatctgctcgcgtcctcggccgacccgaccgcgctcgacttcatccggctcgtgctcgagagtcagccccggtcgagtctcgtgatcaacgcccaggacaccgagtcgggctggacggccctccaccgggcgctctacgtcggcaacctgcctgcggcgaggctcttgctcgccgacgataatgtcgacccgcgtgtcaaggactgggaggacatgacgtgctgggaccttttcaactcgacggtcgaaggcaccaacccgcccgaggacgtgaccgagggcgacgccctcttcacctggggcacgaatcgcaactttacgctcgggaccgacggcgaccgagccttgcccgagcgcgtccacctcaagcgggtcgaccgtcgccaggcgtcatcgcaagcggctttggccgaccaggacagcgacttggatgactcgggcaacgacgaccggcctgacgtcgtcggagccgaagaagtcagagagcggggtgacctccgtctgtttgagccgctcggcgtccgggatcttgtcatgtccaagctccacaccggtgcgccccttcagctgtggtgtgcttttcgtcgactcagctgctgatcttgcttccttccgcaggcgtcatcactgccgagcgctccaacaatgtctcgctctgcggctttggctcgaatggccgactcggtaggttctctactgaatttgaagcctgctcgtgcagccgctgacatgaccacctgttttctcaccaggccggtccgtccacacgcaaatcgagctcacaccgatcccagacttcccccaggcagtgacggccctcgcgctcggccaggaccacaccctcgcgctcacagcgtccgggaccgtcctcagctgggggctcagccgctttggcacgctcggctatcaggtcgaggctccttcgctcgggtccaagttctcgaaggaccccgaggaggccgtgcagtctagcccgcgtcggatcctcggcccgctcaagaaggaggtcgtccttggcgttgctgcaagccgatgctcgagcgcgtgttggacggaggatgccgtctggacctggggccagaacaacggccacctcggctacgacgtcggctcaggctcgcccgtccagaccgtcccgcgcaaggtcgccggcatcacccagcccgtcattggtctcgccctgaccgactttgcgctctgcgtcctacttgcgaccaacgaggtcgtctgcttctaccgcggcggctcgtccaaggtctcgttcccatcgcaccccttcttcgccgagtcggccatctaccggccgccgcaattcaatcggcggctcaaggtgacaaaggtcgtcgcgagcggcatcacctttgcctgcctgacctcgctcggcgacgtctactcgtttgcgctcccgagcccgaccgaggttgagcgcgaggcctcggccgccggcgtcagcctcaaggaccgcgcagggctcatcaagcctcagcggacatgggcgctccgcaagcgcttcactgccgttagagacgtcgcccttggttcggatggggcgatcattctctgcacgcagtcgggccacgtcttcatccgctcgcgcaacaaggcctcgacggccggccacagtgggcctgccggctggggcgccgcggccggctcgttgtccaagacgttcaagtttcatcggattccttacctccagcgcgtcgtcaaggtggctgcgaatgagacgggcgcctttggcgcaatccgggccgacgccgagccccggccggtcgtgctcgagggtcagaccgtcggcgaagacctaacgacgctccagccgcacgtccggcgtttcatggagggtcgcaagggcaccttcttgctcagcccctccgaccagccggtgcccgccactgccgccactgcgggcgccgcagacgacgacggggccgagattgaggtgacagccatccgggccgacatcaagattgcgactcagctcgtcgaggcgaccgacacgtgggcggcgctgacaggctaccggccgcttatcggctcggccgggagcgacgttattctccgctcggcaggcggacgcgaaacggccgcgcacgccttcgtcctcggcgctcgctgcccggccctcctcggcccgtcggtgaagctcgaccggactgcagaaggcctgatcagagtcgacctccaggcctactctcacctgacggtgctcctcttgctccagtatctctactcggatgacctcccggccgtctgggactcgcgtgtgggctcgcgactccgtgagacgtcgctttgggctcggacgctcgactttgcccgcatccggaccgagctccggacgctcgcggtcgacctctcgctgccactcctcacaccggcgctcgagcgcctgacaaagacgcccgtcgtgccctcgcttgcggccgacatgagtcgggcctttgatgcggcacagaagctgctgccagacgtcgctcccgcatcagactcgccgcttcggccagacgtcgtcgttcagcttgccgatcgcgaagtcgccgttcacgcttgcctccttcgctcacgctcgcccttcttcgcggcaatgtacgacgacgccgactggacgcggctccggctcgacgccggcggtgtccttgcggtcgacatgcgccacctctcgtggccggtcatgcggctcgtcttccggcacgtctacgaggggaccggcgccgagctcttcaactaccaccaccaggagacgctcgacgcctttctcgactttgtttacgacgtcctcgcggcggcgaccgagctcttgctcgaccggctcgtcctcgtctgctcggctgtcgtcctccggcacgtgacgatccataacgtctgctcgctcctcgatacggcctccttcttcaacgcgacggcgctcgtcggctcactccagctctacatctcgcaaaatatggagacgatgctcgagagccactttctcgacacgatgtcagccgacctgctcaccggcctctcaacttttgtcgctgaccagcaggcccggcgactaccgatctcgcgctcaaacgttctcgtcgccgctctgatggccgagcacaaggcctggctcgccatccaagatatccctcggccgtcgttacgtccggcaacacaagccgcacggccgagctccgctgcctcgaaccgttcgccaaagatgtcgcccgccgatgtcgcctcgcctgcgccggccaagcccgttcggcgcatggcgcgaaccacgatcgcctcaccaacgggcagcccagcgctccggccttcggctggtcccgacgacgacttgttcaccatggacgaggacgaagacatcactgggcttgccgccggcatcgccgcctcactcgctctgagccctcctgcgacaccggcaagccctgcggctgcagggccctcttcagccgcaccagcgtcccccgcgccagggacgcctgccaaggccatctggaagccacggtcgatcgacacgtccaagtacgtctgtgcccgccccattggcgcttgactagaattcatgctgacttgccgctcgtgcgacctctccttaggaccgacctccggagcatcatgagcgaggcagcctcgaccgcacgacctccgactgcggcgagcccgagctcaacagtggcccgaccgtcgatcgacccgacgccgtcgctctcattcaagctctcccagagggaccgcaaaaaaattcagtcgcaacccgcgccgagcccaccggtgccaatggcgacgaaagcggccgacagcggaggctcgccatggcgtgtcattccctcgtctggagctggcagctctcagccttcggcgccagggacacccttctccacctcgcctcggcgagacggcggcgcattcccgacgcttgtcggaatgtctcgctccggaagcgcaagcggaccctcggcagcctcccagcggacccgacctccgttcgcctcagccaacgcttcgggcgaggtcatccggccggtccgggctccggctccgtcatcgacgtcgctcttgacggcgcgcaaggtctcttcgtgcgtcagggcctcccttcgtacagaccgcgcgtcgcttcgctgactgacttgcgagctgcctccgaaccacagcgacgccgcctggttgaagccagctttcagcccgccccctgtgcctgttgtcgcccagccgccgccagcatcttctccggccgccagcggcagctcgtttgcctcaattcaggctcagcagcatctcgctcagcgcgcagccgaggctgccgccaacggccggtcggcaaaaacactcgctcagatccaggccgaggagcgggccgaagaggtcgagaaggagcgagcactcgaggaggtcgccttcatgcgctggtgggctcaggaggagaagaggctcgccaaggaggcaaaagcgacggccgctagcggggctgcagccccagcggcacgaggctccggccgctcggcttcgaactcgccagcggcctctaccgcaaccggcaagaagggcgcaggggtcggccagaaggccggcgggcgggccaagaaggctccctcggccgcagcagcgactgcttccactgctgctccagctcaagctcgcggagggaaaagtaccccctccggcaaagggcccaccacgtcggcgacagccaccgcctcgaccccgcgacaaccggcatcaaccacggccggctcctcgggcggcgacgacggccgaccggcccggccaccccggctaacctcagcccaggctacacctcccctcgccctgccgtcggccgttcgaccgccaaggcacacttccgtcccgcccgcctctgccagtgccgctccgttgccggccctgaacgtcaatgcaggcgtctttgtcccgacgttcggcccgcgagcctgacgccttgcctcctttcacttcactcctcttgttatcccgctagacgtctgcttctgagaatttaaaaattggtgttgtatggcagtcgaggcccatcgcaactcaagcgggttgatcctggtcgagcaaggcggaagcggccgtcttcgcaactgagagaaggtcctccaggcgaacacgtcaagcgaccgggaaccagccgaaaccaaagatagcatgatcaccagctgccgagcatctcctcgcccccaccgtgattgacgagcccctcccagaagacggccccttccgagctaccgccgctgccgccgaggaccgtcccgagcgcgacgagccagccagcccggaccttgcccggcagctcgaaggccgagagaccgagcggaagggtcggcgcgagcgcgaagagtggggacgtgtcggccgagacctgcggcgcgtagagcgccgggtggtagggcgagtcgacggccgagggcgcctggagcgagtggacgatcctgagagggaggttgcaggaggaggtaagtctcgtagatatccaagggcatgcaaggccagaagggtgaacgcacgaaagaccgatccaccaaagagcgacgacggccgcccaccaggcccacctgccggccttggcgtcggtcgtgaccggcacatcttgactccgcctcgccttgacccatctgacctcctcaacctcgcggcgaacgactttgactcgatcgagcaccgcccgctcctccgcctcgacctcgccgagctgtcggcggaggtgcgcgatgcggaggcgcgagggcgtcgcaggcgaagctggtgaccgggcgggtgagagcgagaaggagagccggcgaatggccggtgactggcggacgggcgtcgtgaggagcgttcgtgaagaggacggcgagaagcgtcgtgggaccgatgaaggcagtgagacgacacgctgctggatggccgccgacgtgggtctgcaagaggagtaggagacaggagcgttagtcgggcgtctagctcatgttgcgggggtcggagaacgcacggaagctgtggagcaggaggagcggcggcaagcggcgagctctcgaccttccgtcgtcgaaggacaacgacttcgtcctctacatccggagccgtcgaagctcgacccttgcccttccctgctgcaccgccaggcgtccagcaccagccgcctggcgcccgcggcgtcggcgcgccgactgtccctggcggagcaagcgagccgtaaatagccctgcgcgcgggcgtctgagcgaccgatggggcgagcttggccggcgcggcggatgccgcttggcgggcttggggcgtttgcgagcgaacaggcgggactgcaacggcggctggaggcgagagcgggattgagtcaaagacttcgtcgccgtcgtcgatctccgatccggcctcggcgaggtcttccaggccagcaccgaccggttcgtcctcagaggcaaagacgctcggctcccgttcgagcggcgggaccgaagcgtccggacgttccgactctgcgtcgtgcctgtcgctctggccttgaccgcgagcgtcaacctcctcctcccattccgccgagtcggtgacaaagaccggggcggcaggaggaggcgtgctcatcctccgcggcgaaaagcgctcgcgcgatggcgagccgacgatggcgcgaaggggcgagacgtaggcgctcgttgagggcgaggtggacgagggcgggaggacaaaggaggtgctcttgcgcagagaggagcgatgcggcgatggtgggaatacctgagcacgttgcggcgaggcatgcgctgctgggctggcaggcggcgtcgaagatcgctgagccatcgggtgggcgacctgtgacgatatccccgagctcgcctttgcccgcgagacggatgcagctgcctgaggcacgaatggcgaggggccgggagtcgcaaacgactttgacggcgaccgccggagctgtctcgacggcttgaaagcgagcgactcgtcctcttccgcagcgcctcctcggccaggcgtcgcgtacatcgacgacgacgggctgtcggcgtacaagtcgcggccagcggttgaagaaggcgagggcgcgtcaaacgcctgcgcgcgggctttgcccttggcagtcgagctcgtccgggtccgtgatcgataagaagggtctgcgtgcgcggccggcggaggaggcgttgaatgcgcagcgatggcgggcgagagcgacgcacgagaggcgagcggccgagcgggcgttggctggggttgcaagggcgtctgcgtctgcagcggcatcgatcgaggtgtcgtctgagccggaccggcatgctggaaggccatgaacgtctgaagcgggctgcccgcctgctcgcgcgcagtgcgcgctccagcaaggggcgaatcaaaggcaggcggcgtccgcgaccgatggcgggcgtacgagggtgccggcgtcggctcgtcgtcaaacgtcgcgccggcagtaccggccgaccggtcgggcatgtggcggccgagcgggccgaggagtgacgactcgtcgtagaggccgaaaccggccggcaagcgtacgggcggcgtcgcctcctcctcgaacgccgttgagcggtgatgtaaccccaaggcatccgcgccgtgccgagacgaaaacgccggcggcactcgcataggcggcgtcggaggcgagtcctcgtctgtccccagcggctcctggtcgtccgtcgtcgatccggccgggggctcaggcgagcgcgagatggtccgctgccgatgctcgggcggggggaagcccctggccgagcggagctcgttcggatgcgggacgatcgtccgccgctcaacgggtagggtggttgggtgctgagcgggcggcgaaagcagtcgaggaggcgaggggagggatgtctgcgacgtcgacagccacgactggacggccgctttcgaccgcgacgcactcgtcccggctccgcttgcagggcccgacgtcaaggtgtatgggttccagacgggctgggccggcggctggcgcgtcgtgttgggcgagctcgccgtccggccccccgttgttcgaggcgagtcctgcgcgcgcgcaaacgcctcgcgaagccgccggacagagtcgacccccccgcccgaagggatgcgggctctcggcccgcttgtgttcgggtacgcgctcgaggcggggaaagaggtcgaggaggatgacgagacgaacgttggctcgtgctggagccggaggagcgtcctgtcctcgacctcgccgagaagatgctggagccctttagcgcccgcgagcgagcgcgacgtgctccaccagcctgcggcggccgccgttgggcccgggccgggaggcgtcgtcgattggaatgagtcggccgaaggcggcggggtgatgtcgacgaggaggccggcgcgtgatgccccgccgaacgacggcagcgtcgctgagccctcgcgatcggcgcgggtcggccacgaggtcgacgtcgaagcgtagcgaggggtcggctcggcttctgactcgccggcattgtcgtcgtcggtcgtcagctcgccctcgggcagctcgtcaatgacgagtaggtcgtccgcgaacgagttgccgccgccgccgccgccgcctccgccgtcccagccctcgaggcctgggatcgacttgtctgcgacccatccaaagcctgagcgaccgccgtgaggctcctcgccgtcgtccgaaaagagcgaggtctcggccgtcgagaggtgggacccgccgccggtcccggttccggtgccggtcagggtcgagccggacgcggtaagcgtcgtcgcgggcggcgagggcgacagcgtgcttgagtttgagcgcggacggcgcggagtgagggaggaggaccgcacgatgggagatcggctggcgcttgccaggatgctctggatgggggccgtgggtgcgaggcgcaggcgccggtcggtcggagagaggaggacgcgacgggcagggctgagcgcagccggagcgggacgggtcaacaacggcgcgtcaggcacgagtcgctgccgtgccacatgcggcatgagccgatcagttcagacgcacctgtacggcccgagagatggccctttgagaagagattgaggtagcgcttgtggggtctagcgtcgtcgttgcgtgtgttgggcgaaaggctggcgaggcgacgctcgacgcgccacgctcctctgcgcgcgcttggggcagaagtgcaacttcctggccgcgttaccccgttcggggctttgcctcgagcccctcgagtgccctgtgagtggcctccttctcttcgctcagctgaggctgcgagatagagctgggatgcacgactgctctctcggctagcttctgaggtgctgtacgtacctgttgaactccgccaagcgacgagagcactcttgcgaggggaaggtcgatgcgagctgcgcgccggccgttccatctcttgcgcttcaatgcccccggcccttcctcctctcctcggcctccctctctcactcgcccgcccgcctacctgcctgccctcgcccacgcagaccgtcgtcctccgctacggatgggttcccccgcggcgacgactgcggccacacctgctgccgtcgacgacgacgacctcgcgacgccgccggcgccgaataacgagttcgccgtgccgcctgcttcgcctcgtgctgcctcgcctccctcgccatcgacgggcagcctgggcgcagagccagagaccgatccaagcctgccggtcccagcagacgagctgccaatagatactgtggccctggcgcctgccagatcagcgtttggcgacgtcctgccagcttcctcgccgacagacggcggcgctcgatcctcgccctcgtcctctcccgttctgtcggctcgcatcctcccacctccacggccagtctcgcctccccctccgccgctgaagcgtcctgccccgccgaagaagggcatcctcaagccggcccggccgccagcgcgcggcttgctcggctcgcttatccgcccgtcgccgaccggcgcggtcagccggctgatgggcgacagcggcggcagcttaggctcgggcccgtccgctagcggctcgggtgcgagctcgttgtcgtcgggcgctgtcgggtcggtcgtacagcaaggcggtgagcgagccggggccttcttcagcaaggcctttggccggctctcgagcgtcgccgccggcttgccgctccctgcctccgtcgctccggccccgcctcccaagccgcccgctccctcgaacgacggctcgtcctcctcctcctccgccgttgcgaagccttcatcagtgaccatctctgcgacggccgacgacaccggccggccgcggctgaaaaaggcgacgttccctctcgcccacatcgccatcacctacccatttgcggcctcgctcccgccggcgtcagaccagacgacgaacagcatcgcccaggtcgaggctgactatgcaaggcgccaggccgacgagggcggggccgagtggtggaccgagaagcgcgtcggcgagctgtttgagtgggccgtcaggatccgtgaggaagggatggacgaggcggtccttcgggccatcaaggtgcgttcacaacgccttgttttttacgaccgcgaacatacagtcagctgaccgtctctcgttgaaggcttctgctcctttgcctccagcaccgcgcacgcttgacctctctgccctcccgctctcgcgcttcatcgttgacgccctcgccgacgtcctctcgctccggctcggcctccgccgactcgacctctccggcacctcgctcgccgaagactccctcaagacgctactctgcgcactcctgctcgcgggcgagctcgagtcgctcgtcctgcgcgacaaccggcggctcaagctcgctggctggcggatgctcgctggcttcctcgcagatgagcgcgcgcgcgtgcgatttcttgatttgagtgagaacccgctcgatcggaggagcgtcgaggtcctcgtgccggcgctgcggatacggacggcacagaagagcgcgctggcgggcgagtgcgacaagggttcgccggcagcagcagcggcagacggcggggtcgagacgctccggctggatagctgcgcgctccgcggaggcgcacttgaagctcttggtttgtcccttcgactgcagcggttcaatccggcgagggcgctgactgccgctctgctgccctctgaaggccagggcgtgcggcattcgacgatccggcatctctcgctccgcaacaaccggataccttcgctcggcggcgtctcgctcgccgtcatgatcaaggactacccagacgtcagcacgacaacctcgtcacctttcgcgccgccgccgacgacgacggtcgatagctcagctgctgcgtccgggccgtcagcctcctcgactggctcgggaccgtcgtctccgtcgacgacgacagtgacttacgcgccctacacgccgcgagggcgcaagccccaaaccgcgtcggggacggtcgacgcagccggcgcgaatgacgacggcgccctgcccgagattccgtcggtcgcgagcaactcgaccggcggcattacccggcgcgtcgtccctgcttcatatcgccggcccgggatggactcgtcgtccggctcatccggctcgtcgtccgccggctccgacttggacgatgacgacgacgacctgcctcggcggccagaatcaaagggcggcgcggcggcaggacgcgatgcggccattggccggatgatgcagacgcgcttccgagctctggacgacgtccagcggcttgggaggctcgtgacgcttgatctcaagggcaacgacctgcgggtcagtcctcgtccggcactatcctcggatgatgactcttagagagctgacgaatctctcgcgggtactcccgcagacgggcgtcacgtacatcgcccaggtgcttaaacgcaaccggacgctcaaggtctgcaacctcgccgacaaccggatcgacgtcgccggcctcgtcgcgcttgccgaggcgctcaagtacaactcgacactcgacacgctcgacctctcgagcaacccatgctgcgggcccgcgcttgaaggcgtgcgttcatcctgctgcgtgtgccgcaagaccgttgagccgcctcgctgacctgaccggctacggtgctcgttcaagattcacgccctccggcatgctttcacgctcaacgccaacctctcgcgcctcctcctgtcagcgaccggcctgacgacatcgggcgcgatcgccctcgccgagtttttgcccgaggcgacgcacctgctccatcttgacctgacgttgaaccctgcggtcgagacggctggcgtcatggcgctcgcggtcggtctccgggcaaacaaaatcgtccgatgcctcgacctgagcgtcgctgtcggtgacgaagtgggcctcggctggtcgagggacattctccaggtgcgctgccctggtcccgtttccgcttcctccctctactctgcctaagctagcctggcctttgcttcgcagagctgcatccgcaacaccgagctcgcccaggacaagtcgttgaccaaagccgcccggtttgccgtctgggcgccgatccaaaagtcgacgctcgcccggctcgccaaggaggccgattcggcccgggcgctagccgaagtcgccgccgaagcagcgacgccggccggccaggcccgggttgccatctttgagctgagcccgagcgaggtcgaggagaaggccgaggaggccgttcaggcgctcgcggacggcgtcgaggtcggcgatgctctcggcgtcgtcgtcgtcgctgacttctcgggcgcggtcgagcggggcaaggtcctccgcgagcggctcgaggagatggtccagcaggctgtcgatgacggcggcgcaggaggagacgggggcgagacgagcgacgaccggttgcaggtcctgctcggtctcgtcgaccggttgacgactcagctcgaccgggcagatgtcgccctcaaagacgccgccgagaagagcaggcttcaggcgatcctcgaccgcgagacggcagcagcagtggccacccagccgcccgcaccgccgaagctcgtcatcccgaagaccgcccaggcagtgcagggcggcggactcctcccgcccgcggcggtcacgccgaccaagaacggcaccgccgaaccgctctcgtcgcccaacttcagcatcgccgactcggacgacgaggacgacgacggcccggtcggatccgacgacggttcgagcgacgacgacggcgtcgagcagctccttgaccttccaggtatggcgccgagctcgccgaccgtcaagaagagcctcaagatggtcgaagaggagggcgagatctttcgcaagggcgtcgtccttggcgcggccgacgtggatgacgaggaggacgccgttgcggccgtctcgggcgaggagctcaagaaggaggtgagtcgattgtaaactctgatccgtcagcgctcgcaagctgagcccctctcctgtctctctcagctccttcacacagacgtccagcggcagactccccgccgcctgtcggtcgacgagacggatcgaccgctgactgcggctggtgtgccttgaacctgtcgagacaacccgggggagggggcggcatcgttctggcagggactcacgtgtcaacggcgaagacatcccgaccgagtgcgtacgacatgatggctccagccgtctttgcgccgacgccgtgcaagctcagcagctcgagcatggtctcgtcgtcgtcgaggtcgtgcaggtgctcgaggctgtccttgaggctgatcggcatgccctcgatcctgcttgcaagatcgtccaggagtgttttgatcgtctggtgagataaagcacgagaagatcgggatagtgtcagcctgctaatcagcaacgacttcaggctcttattgtgtgcagtcttaccttgcctttcacgttggacaggccacccttcctgagagtgtggacaatcttctcaagggacgccttctggatcgcctcgtaatttgagtagccgaaagtatcgtccagggcgcgcttgttgacgcggtaattctgacaagaagcactgggcggtcagcgagttcctcgaagcgcgaggatacttcgattgctcaccctggcgtttgtgttgagcgttaggatgcaccgaatgacggcgtcgagcacgccgtctgcgattccccggtcggtttgctcggcgccctcctcgtcgtcttcgaagcgagctcttttcctctgaggtggcttcccatgctcccgctcaagggcctgcgagaccgcttcgcactcctcctcagtcggactggcgaaggacgggtagggcgtcgtttttgctgggccgagctgcgtcatcttgcgcttggcgagcgccgtcgccaccttgctgcgcggagggatgggccgaccgccctttgtcctcttcgccgcagagtccttcttaagcggggtaggagacgttctgagcgccatgagggctgaggtgctggccaagaatcgcgtctgccaactgggcgtgaagttgacgaagggcgatgacgcgcggcgagggctatcgactccggaggcggcggaggacgagatcaagagctggtgttgctgcagaaggaggtggtggaaagagcgatgtctggcggagagaacgcagcgtcgtcccaggtgcatgcggagtgatagatggcggatgggaagaagatctgcttcctctccctgtgacccaggacttcgagagcgggctgagcaaccgttgacaatgtgtggaccgccgtctttcctggaaagacaccatctcggccgggcgtctgggcctgggatcgctccattctagccgagcctcgggctacaggcgggcgctcggccgacctgccggatgccgccttcttctcgttcacgctcgagaactttggcttcgcccccgaattgcgcaacggcggccagggcttttcttgacaggctgttggcgatgaactgtcgcctgcctcgtcgctgactctcaggcctctcgctacagacaagcaggtctttcgctctaccctcgcatggccctgacaaggcccggttgcctcgctctgccttgtcggccgcccctttttgccctgtcattgaagactctcgctttgccgcacttcatggacgcccactgtgagcccaagaatagcttctgagtgactggctgtcgtccgccgtcgcgggacacccgccgtcgcggcgaacggcgcggccagtgcagcggccgatgcaccctgtttacgtccagctttgtcagctggtcgaagaggcgtaacacgactccgcagctggcgagaccgttagagcaggatctggatagcacggccgccgtcgcacaatgctggcgcctgctggacagcgttgcgagctcgcgtctgccgagatcagtatcgagagagaagcgaccgtcaggactgcccggcgagcgagactcgacgatgccggcaggagctctaagtgtcacacggcggcggaggccgacgtcgcgtctgagcgtgagctgaagcgagcgaccctccgatctggtcgacccttctgcccgttaacaaccgacctcctcactgatgcagcaacctcagcttgccagcacgcccgagccgctcatcaccccgccaccgccaccgagtcggcggccctcgccagacagcgactcggacgacgacgacgacgacgatgacgatgacaacgacgagctgccctcagccgctagcggtacgagcgggaacccgtcggctgcctcaacggtcgggccgttgacgtcggcgacccgactgggccgtaggatgaggaagaagagagagagagcatgcgactggtgccggcatcgtaaggtgaagtgtgacggggcgtcaaagccaggccagcagtgcagcttgtgcgagcgtcagtcgctctccccccttagcagctcctgagttgcttttggactggcctctagctgacgtctgactgcatccgccggctctccaggccaaaacgtcggctgcacctatgtcagcaagagcaagcggcgcaaggttcccgaccgcggcgagcagtcgacgagcgccaaggtcactcgcaagagcaccagcgtgcgtgccggctctcaacccttgtccgtctctctttgagctgatcgcatttgtatcaattagctgccacctcccgccgccgacagcggcacgcgagtcgcgaccgcaggtactaaggctatcgccgactcgcacatgatcgcgctcggccacgatgaggtcgacccttcggctggccagtctcccttttcgccaggcagctcatcggcctcggcgtcgcgccgaccaatgtcgtttatgggcaggtcgagcacgatgagcctcatcgtcgagacgcacgctctcgttgtcaagcagaagccgccgcaacgtacgtccatcagcggatttgtctggaccggcctgaggagcgttacctgacgatcgccctggcctactcgcgcagccgtctcaacgccgagtgagacgtctgagaagaagcacgttttcggacagcgccaaccttgggaggttgaatcttacatcgatgtcctcgcgctcgtcgactgttggcctgcgcccgacttggctgccgcgcttgtcgagacgtactttcgaaggaggaataccgcgcgtcgccaattttctttgacggaacaagcttgtactgacaagtcttcgatcgacattgtatcgtgcaggttgttcctctcctgcaagagaacgagtttcagaggttcgtctgacgctctgtcagccgggctgcaagcgacatgcgtcaggctgctgataggtgcacctctctcgttcctcgacgccacagccgcttcgcttcatccgactacctgacggaccggacctttgcgagcctgtgcttgatggtttttgcgctggcagcgcgcgagcacattaacgatccgcgtacgtgggcgccgtcgatgtcgctcgacccgtacgggccagcgacgtttgatcggtggtcagcgggatggcatgtccggcctctctcgcttggtgcgcgctatatggcgcagctcagtgctgaccaccgtccatgacctgcagttttaccaccaggcgacccggcaaacgcggcaccggacaaaacccgccgacctctgggacatgcagctgagcgtcgtgcgtgtcttccctcgccactttgagctcatcggccccgacttctgactgtctcagctctctatcagctctcagcggagtttcttggcggtgccagcgccaacccgctcgtctcgtggacacttattggagagggcctgatctttgcccaggtgcgtgcttgtgcgggcgtcctgttgttctaccttgcctgtctgacgccctctcaatcgcgctgttgcaggagatcggggcgcaccgaagcggccaagcactctcgactgacccggcggaggaggcgctgatgagacgcgcgttctgggtgtgcgtcagcttccgattcaccgacgcgtgtgcgactggacgctgaccagactcgccctccagcttgttctgccttgacgctgtgatctcgacccagattggtcgctcgtaccatatcgctacgagcacagtcaacgcccctctgcccgaggatacctctggcgttccagcgaacgagacgtcgatggaagccttccggctcctcattgacgtagccaagctgctcaagacggccggcgactcactcgtcagcccacccacgaccctcttgctcatgacagccgccatctgacccgcgctcttcactttgcacccctccagtacagccttgacagcgcctctaggagcaggtcgtggctcttgctgcaaatgaaggcgctgcacgttgaggccgatgcgcttcagcagagactcccgctcgccctgcgctggacgtcgtcgatgccagacgagcgcgtcttctacgcggccacctgcgtacaggtgatgcttcagcagctgctcctgctcgtgcatcgcccgagcctgccgacgcggaaccaagccgcagggccaccgctgtcgccctcctccttcgactcagcggtcagcgctgcgcttcgcacgtcctacatcgtacaagcgctcagcaagcgtggcaatctccaattgccgttcgtcggcgcagccgtcacggaagctgcggcaacacttggtctcgccttgctgggcgcaaatcatgctggcctcgtcgtcgacgaggagacgctggcccaaggtcttttgcgctgccgcgagtgcgttgccgccggttgcgaggtgccattggcagtgtgagtgctcggcttctttttctcgcttctatgagtcccacgagctgataaggaggcttccacagcgcttggatggacgacatcctcgagcttaagagccctgcaggccggcccgaacccccatcgcgactgccgtcggccttcctcctgcattttggccctgctggctctgcccctcaacctctgccgcagccacctatgccatccgctccggtagcgagcgccccgcctgactttgcgttctcgcccttctcgctcgagggctttgcggcgcctagtgcagtcagcagcaaccccttctcgcttgaaggcctcggctttgggatcctggacccctctgttggccgcctgtcgtgatgcactgcctggctgcccttcttccaactgctccctgtactcgtttattgcgccgatacctcatgccctctgacgaccttcgccaagctcctcttaggctgctcgttaatcctgcagcaagttgagtcatggtagggtcgagcatcagaattaaactcctcgaaagaccaacccccccgctcagaagcccgcgccgaggtctccgtaccaccatgagaggtcgacctcgttggcggcttcgcctgtgaagggaaagaagccgagatcaaagtcgaaggtcatggcgctttgtgcgtcgaagaagggagccgtcgccgaaggtgcggcggactgggccgtcggcgcaggccctgcgccgtgctgggcgagtgtgagaagcgtctcggctgcggtcgggttcactgatggcggcggggcaggcaccggatcaggatcggagggcgggacacccaacccgcgaagcatcaacaactggttaatccagcccctgacgggaggacgtaaaaatgagaaggtcagcccgagacgcgtctgcggcggacgaggggcggcactgacgtccgcatgccggctgtcgcccatagcttagtcgaggccttgttgatccggtagcagcgcttcaaacctgcctcgagactggcctcgtcgtcgacaatgctggcagcactatcgccaaagagcgcgattgcaaggacgctgcccgcaatctgtagcgcgggcgatagtaatggcaagcctgggcccgagcggaggctctgcgcctcgaggatgagcgagatcttgagggcagaagcgacacagacctcgcaaaacgaagtcgagatggaaggttgcgtcggcgcctgggcctgaggcaatgccgaacgggtgacgtagatgcgcgcgctgtagacgattagctggatctggagacgaaagcgtaggttgcgtcagccggcctttggcagtctctcgaagggaagaggagcgacaaacagtcgtcgcctggtggaagagccgggtgtcggtctgggacgccgtccatcggagactggcaagagagacaggtctagccaatgttagtcaaaccggccgaaactgccgcagcacagacagctgaccttggcgggagcgcgtattggaaggcgtcaatctcggccgtcagcatcgccatctgctggagcgtccacgtcttggtccgcgactggttggcgatcgagtactgcagggccgcccgactgtcgttcagctttcgagaagacgaatgagagcgattgcgacgtaccatcgtctcgacgcttttgcgcagcagctcagccgcctcgacaagcagcacaaaagcggcgacgttcgggtcggcgacgccgtcccactcgcggacaggcagaggcgcgtcatacgatcccggagcgatatgcggcggtcggcccgtggcagccgagatctccgagtcgagcacgagcaggctccagaatgcccgtcgcagcaagtcgcataccgcagcgtcgtcgttcagcggcacgtctccccgatgggtgccgagctcctgcagaaggccaaaagaagtgagcgcgagcgcaagcggtcgaaagagtagaccggtcgcacctttgcgtaggtcaggccctcgccaacttcgaggcaaagtagtcatagtgtcagctacgtgagccacaggcggcagaccaagacatagaagcgacagaggactcacggacgacccaggacacggtcgggttgctcgagtggccgagaaagatggctgtcagctggcaggtagaagaagcgcaggaggggtgtcagcttctgcaggcggcggcatcacgtccgtgtcaggtgggcgcacgatgctgatctgcaagtcgtagaggctcgccggccgcagcctcgatcgaggagtgcgcatgctttggtggtactgcaaggacggaaaccaaagtcttttcagctgtcaaccctttgcttgcgctgaagtcgaggacgcacaaaggtccacccgctgctgtgaagcccgagccggctcggcgtgacgggctggcgagggtcttccggagcccagcaccggcctggacaaacggcaacgatagcaggtcagtgggacagccagctgatgaaagccgaaggcagtggaaggtctgactgtcggaaaagccgtggctgctggtgaccgcgaagatctggctcgaaaaggcgtattcagcaagggcctgcaggcggacaagcacagtaagaatgagctcaccatcaggcaaaggttgcgaaagccaatgtcgctcaggtagtcgcggtctcgaaagcggctgcacggacggaggagatctcgtcagagactcagctttgacagacggaagcctgaacctgcgattcacgcgcaaaatggcccttctcggaggaaaggcaaggcctgaggaacaaaagggcgatttttgagcgtttccagtaaataacggcgatgaccagcgccctcggacgaacagggtggattcgctcgaagaagttgttgaggagcgcaaaggcgaggtcggtcggaggccagaggtcgagcccggacaggctgtcggcgtactcgggcgtctcccagatgggcgacgcgccgagactgtagacgggcccggtgggctgggctggagcggagggcgcaggccaggctgtcgtcaggcaagcagagctgatgatcagcttcaagacgcgcagggacgacttggcgagaaacgacacgcacgaggcgtcggagcattggcgtttccgcgcgcaaggcgagcggccgcctgagtgagccacagtgtcgatgactggcccatgtagagacgactgctgctcggcggcggccgcgtcggcggcgtcggcggctcgtccggatgcggcagcgcctgcggccggaagacgagcatcatgttctgggccgcctcgtggtcgatctcgtgctgagaccgctgggtgttgtcgctgggtccaccaggcgtcgatctggccgccatcgacaaggctggcgagggttgtacctggcagatggcgccaccgagcagggtcagcctcgcagcgcggtaaagccgcaagcagaaggcagaggctcacctttggaacgctcgagcccgaaccagccgaaggtcgcgggggattgttgcgcttcttgctcttgaggacgtactggcagacgataccctgaaccatcgtcgtccgcaccgaccccgtcagcgatactcgcagcctgaccaggcgatccagctcgcaaagagacgtaccgacttgcggcaaagtgtgcaaactgagcaataggcagaagatcaattatctgtaagcgagcaacccctcctgctgtgaccgggcaggtccgccagttgaggagtgtgacaacggccaactgcgcgtgcctgcgattcgccagcaagtgcgcttgtcgtgtgacgctcactcgccccttgcccgaccatccccacgagctcttcttgaccggtttacggctctggccgcctagtccgatgcgagaagtctcgacacacctctgtcctcgaatttggcgccgtcgcagcggaccctgtcgacgcgatgagaaggagccagtcctgtcagcctgagctgcggatgatcagcggcctggctctgactcacttccgcgagcgacagtggtcacctagggacacggacagagcaggagatagggcggtcagccgtcgatggcgccttgtgtcaagcgacggcctggcggccgcatggtcgctcgcccgcggagagagagtgacgcacaggcccgctcccgctttcgcttgcggctggtctgcgaggtcgatggcacgaagccagatccccgagcaggcgagtcgtctccgtcattgtcgtccgagtcgctgtcctgctgcgaaccagaggctgtcggcggtcgatggtcgtactcgagcatcatctcggcagccgtcgttgcgctcggctggcggtccatcttcggcggcagaaaggtggcttggccgagagggcagaagagggctcggcgtgagaagctgagtctggatcgcagtcggcgggtcagcgagagctacgaatgaggccgcagttggggtcgaggttgctggcggcggcggacgacggctcggccaagctgccttcggccaaagagggcgagacggccaactggagatgcgatcgagatacgagccagggacgatggacaaccgatcgacatgccagaccgcgcgacaggcgggccgcagacagcgggcgagatgagagctagatgatgagcttgcacagagagcgacagcagcaaggggttcaggtcatggtcggacagtggatctgtcgctgctcggccaagctggctcgccgcgctgtaaacgcgaccttccagctgacggccactcttgcgccgtctctccctccgaccccgctcctgctaaccgtggccgccgaaaggttggacccgcagtaccggcctgctcaggcagctgcctgtacgcaaggatcgagctcgatctcatatggtgcggcggtccagggaacgttgggcgctggctgccgccggctggccggcctgtcttcgatcgcctgtgctggccgtcggtttggtccggcagagctcgacacggccagctcgagcaaggcgagcgtcggccaacccgccgccggccgtgaggacgaccgcgtcccgcgttggcctcatcctgcctcgctcgcttcctacaagagtatcggcaggagaaggaagaaaaaggagagctcaccactcactcaccctcaaacgctcgacgcctcacaccctaccctgcttgacctctggcccgcaccatgctctccaccttcagctctcgctttactgcgctcgccctcgccggtgtcgccctttctgctctgcccgcgctcgtacgtcacacccttcgcttgcgcgccgcgtcccagcgcgacctgggctgactgaccttcgactgccgatccaccaggcccaagagtggaccgaggacaactggcaggtcaccgaccgagacgacccttattaccggcggccagtgtgcgtcatctcagagcactccggcgcgctttcagaccttcagctgactctggtcgctgtgttcgctcgcagtgccggctacattcccgccatctggccagccgccctcttcgcggctctctttgccatcctggccttctgctcgtggatccactacgcgcggcagagagcactcgtctggctgcccatcggccacacggcgatgaccgtcggttttgtgcgtcgctctacaaggccgttccgactatgagttgcgctcgaccgactaacaagtagcatcttccctcctcaggccatgcgtgtctacatccatttcaaaccgttctcgatcccaatctacgcggtctcccaggtgcgccgccaacaccccgtctgcgctcccctctctcccgtagctgacgcctcaattcgtctctgtctgcgctagatgctcatcctgatctcgccctgcgcctacctggccatctggtctgtcccagaccttgtcgatcctcacttaaaaagccggctcatgaagctgatcgccctcgcaccgcctcgtcgcccggcagctaccagcttctcggcaagatggcgaccgccctcgggcccgaggttgcgcgcaactgcgtgctcatccgcgtttcgctcatcacgaagatcttcgtcacgagcgatctcgtcaccttcttcgttcgtccatgtagtccccgacttacattctggcgaatttgctctggcgccaactcaaccctacccttcgattgtgtagattcagatctcgggctccggtctgcaggcagtcggcgggagcactgcgtccatcggccacacggtcgccctcgtcggcctcatcattcagctcgtctcctttggcacctacttcttcgtcctcgtcccgacgttcgccatccggacgtgcgttcacgttgtgtttcccttctcattcagtggccgcgcgcacgtcctgatcgtctctcaaccttctcctccagccgcaagatgttccccgaggcctggcaccggtctgacggcaccttctcggtccttcggagcgtcttcagctggcaggattttgacgcctggaaggttgtcttctgggccaacgtatttgcttgcgccgggctcatgatccgctgcgtcttccgcgtcgtcgagtactcgcagggtcagtctccgctctcctccctgctcacacaaggagcgcctcgtctgacgcccagtctcatctacctcaggctacaacggcgcgattgcgaccaacgaggccttcatctactgcctcgactcgctcccgctctcgatcggcctcggcgtcttctgcctcttctacccggcccgcttcctcccgcgcgcggtcttcgttaagggcggcgcggccagccagggcgagcgcaaaacgaacaacctcgagctcggccagcgcgagcccgagaagacgtacggctcgcagtagatgcgccgccaccatgtacatgcccccctgccctgcccctccgctttgttccgtacgcaactccactccctgtttgctcacatgttctcgtcgtcttgcctgatctgactccttcagctagcctgcggcattcgctggctgctctcggctggcgcagcgctaaaagcgaagtgggccgcatcaggcctcgaactgcagccggacgtaacactcgacttgctgtcttcatctctccctactgtagcctttcacatcgacctttccttgctgtgatgaccggtcggcaaaccgacaaactgaagctgcgcgtcgccggctgcctctttctcgggcgagaccggccgacggggcgagcgacgctacctcagcccacgtcgcttcttcgccttgaaagacattgttagaggacaatctgctccttcagctcgcgacctgcttctgctgatcctcctctgggcgaccttgaggcgcaaatgacgagaaccgacgacaggccgggccgagttcaaatgcccttgtcgctcaatgaccaacggccgacggcgggccgacataactcgtacctcgacaaccaccttcctgctccgcatctcccgtcgactcttcaagcaactcttacacgatggccggcctgaccatgcacgtcctcggctgcggcacgatgggtgtcgccgttctctctggtccgtcccatcgactcgagccaggtcgcccccctgcctgcgcgcgcgcgcttcctgactcgcccttgccccgtcgcccctccgcctgtcgtcgcaggcgtcctccagtcgctcatcgacccgctccctcgcgtgcctgcgagcgggacgacaaccccgctcgagcccgacaccgatgtccagctctcgcgcttcatcgcgaccgtcggccggtccgtccttcctctctcgcttcagccctgctcggccggtgtctagccgccgagctcccctggcgcgagcgaccctaagctaaccaccgctcgttatcgcaacaacagcccagaaagcgtcaagcgtctccgcaagacgtttgaggcgctcggtctcggtgcagaccgggtcgaggtctggagcggcgaccgcaacggccaggccgtccaggaggctgacctgatcctgctcgcgttcgtttccctagcgctgcgcttcacttcgcccgcatccgcccgagctaatagacccgcccttccgctcttccacagatgcaagcctcagcttgctaagggcctgatcgacgcaattccgaaagaggcgctcgagggcaagctcctcatctcgatctgcgccggactcaccatcggccagatgcagtcgtgggttccggcgagctgcggcgtcgtccgtgcaatgcccaacacgccctcccgggtgcgtcctggtgcgatggaggctcagtctctctcgctcagtgtctgacaccaccctatccctgggataccggtccagatccggcaaggcatgacgatcctgacgcccgtgccagcgtcggttcacctgccgacgatcccctcgccgaccaagctcctgcactacatctttgactcggtcggccggacgatcacgctcgaggaaaagttctttgacgtctgcacggcgctctcgggctcgggcccggcgtttgcctgcatgtttctcgagtcgctcgccgacggcgccgtcatgtgcggcctgccgcggcgggaggcgctcgagatggcggcccagatgatgcagggctcggccaggatgatccttgagacggggacgcatccggcccagctgcgcgatcaggtgacaacgcctggcgggtgcacaattgccggcttgctctgcctcgaggacggcaaggtccggagcacgattgcccggacagtcgaggttgccgccaagcagtgcgtttcctgagtcctccttggcgatgcatctgtggtttgcgatgctgacctcgtccggtgctttttccttaccggcactcggtatcccagtgcgagcagccttggccaggtccagaagaagtaggacccagcggcaacccactgtttgatggctcatctctcgaagtcgacctcgagcgcaaggagcgctgcagtaaagcgtggatcgggaaacgagtggaggaagcgggctggaggatgagtcctttgacccgacatgtgaaagacggacgacgcgaggcagtggcggcggcgacgggagccgggcggccggaagcgtcgacgagaggcgccaggcagtgttgaaaaacagacgacagagcgaccgatggctggccactgtttttgcacgagtgcagactgcagcagcagacttggaagcctggcgtcccctgcacgcctcgctcaaacaggctgccctgctcatggcgggagctagcagggcctggcctgttgagggccctttgtgtctcgccggaaaccgtcgatgggcggcgcgcgcgacgcggcgtgaggagggcggccgctcctccctccgacctgcctgcatctgtacccgaacagccactctcttcttcacttgctttcttcttctttgcccgggtctagcttttgctccagcctgcccgccatgcccgactcgctgtcgactcggagcctcagcatcaggcacccgcaagcctcgtacagtgcgtccggctgtcgagctctcagacctcctcctccttctcctcctgtcggccttgtcctcgcacgttgagggttgtcgtctgcaagagcagctcatgctgattggcccttgaccctctcaccacctctctctgcccgcgtcctgcccgctcgcctgatcgtctcgcatccttgtcactcgcccaccgcctcgtccgccgcctcgcgtgtttgcctcgtctcccttcgcagccggcgcggagcccacctcggcctcgacctcgccctcgtcgacgctcgcacccctggcatcgcgtccgccgtcggcgtaccagccgcagcaacagcagcagtcagcaccggccctggcgccgcctcagatgccgcggatgagccgcgaacggagctcgacactcggcaagagctcgggcagcggcgagggcagcagcaaaaagggcggcttcctgaacgctttcagtggtcagtccggctctcaacgcctcccttgacgggtctggacgcatctaggcggtacgaatggtagtcgacaccggtccggatggcgctgacattcggtcgttggcatgtgtgtgcttcgacagaaatgctcgggagcagcaagacgccgtccatcggcaagccgtacgaccccgtgcatctcacgcacgtcggcttcaacaacgacaccggagaatgtgcgtcgctcttactctgcgcctgtctgacagccggctggttgccggctgcctttgaagcgcgcgggactagactgatcctctgcccgccctttatctgccggctctcgctccgtgatgctcgacagtcaccggcctgcccaaggagtggcagcagctgctccaggagagcggtatctcgcggcaggagcaggagcagaaccctcaggcggtccgtcttgagcctcagctttcttgttcgcatcccacgcacgcgctgatagcggcccctgttgcgtctttctccctcaggtgcgcgacatcgtcgacttttaccagtcgtccggcctcggcgacccgtcacgacaggctgcgcccggcggcgaggtttgggacaagatgaagggcgctgccggggactacgactcgccgtcgccatcgccatcgccgtcgccccagccgcctaagtcggcggcatcgtctatcgtcgctggcggccgggctggcgaggaccgctacgcgaacccgcgggcaccgcccgctcccccgggcgcgggcatgatgcgcaagcagagctcggcctcaaccgcgacgagcctgagcggcagtggctcggcctttcagcccggccggccagcaccggcgccgccctcgaggtcgtacacgaccgacgacgcccctcggccagcaccggcaccgccgcgtgccgctcctgggcctggctcggccgctcagcctgtcctggatcggtcgatgtcggcccgcgcgcccgcctcgcagtcgcagcggccgcacgaggtcgatcggtccaagtcgcagcgggcgccgcccgcgccgccaggaggctcgtccgccgcgagcggaggcgcaagccaggtcaagcaggccaggccgccgccgtcgtcgcggagtcagtcgaacgggccgcccgcgcccggttcggcgcatgccgcgctgcagaagcaagcgtcgcgggcaaaggagcagcagcagcagcagctggccgcgccgtcgagcggcggcacggcgacgccccgccggcgggtgacgcaggacaaggccaaggacaatgccgacgtagtcgcccggctgatggccatctgcaccgacgccgacccgaccaagctctaccgcaacctcgtcaagattggccagggcgcgtcgggcggcgtctacacggcctaccaggtcggcaccaaccactcggtcgccatcaagcaaatgaaccttgaaaagcagccgaagcaggacctcatcatcaacgagattctcgtcatgaaaagcagccatcacccgaagtgcgtctcacctcctgctacactttgcgcgtctcttggacgagctaaccgccgcctctcgactcgcagcattgtcaacttcatcgactcgttcctgcaccggtgcgttctcgtgtgccgcgagccttgcgaccttggacgagccgcaactgacgtatcttcttctccctctctgcagcggcgacctctgggtggtcatggagtacatggagggcggctcgcttaccgacgtcgtcacttgcaacctgatgactgaaggccaaattgcggccgtctcgcgcgagacgtgcgagggcctccgccacctccacgaccacggcgtcatccaccgcgacatcaagagcgacaacgtcctgctgagcatgacgggcgagatcaagctcagtgcgtgcccttgagtcggctgggccttccagagttgcctgctgaccgacgcgcgtctctacctcgcttccctcagccgacttcggcttctgcgcccagatctcagatccggctcagagcaagcggacgacgatggtcggtacgccctactggatggcgcccgaggttgtcacgcgcaaggagtatgggcccaaggtcgacgtctggtcgctcggcatcatggcaatcgagatggtcgagggcgagccgccgtagtgagtgccgcgactagtctgcctcgactggcaagatatcgtcgctgattccgcgcttctcctcagcctgaacgagaacccgctccgagcagtgcgttcaacgtcctgcctgacaccaattagccaatcctcgctgacgcaactgcccttatccctccgcagctctacttgatcgcaaccaacggcacgcccaaggtcgagcggcccgaggcgctcagccggaccttccgcgactaccttgccgccacgctcgaggtcgacgccgagaggcggccgactgcggccgagctgctccaggtgcgcgctccgacctttcgagacgccgctcacgtcttgacggtcactgacgctccatccgctcccctcagcacccattctttgctctgcgcgagccgctgcggacgttatcgcctctcatcaaggccgctcgcgaggcgagcaagaagtgaggtgccgaagagagcccctccactgctcggcgctgcctcgggcctgccgtgtgtccaccaggagacctcggcctcgcctccgctcaaacgtcaacgaaaccttcgcatctctgcttcgcacctccatcgtacatcacagccttccgaccccgatccctccccgcgcactcgcaccggccgctcgcacgcgcgcgcacgcgagccgacccacgctctccgggcatcactcatcctcccgactcgatccgagcatagctataccctcttcaacctcccacggcgtgcacctgcatgcgcctctcttctcttcgcgacgccggccggcgaagaaggcctactttttttcttgtacctcgtcgccgcctcccctcctctcctcctcccctgctggacactgttcttttcctagccctgctctcctctggtcgccccctgtcgcacttttttctcttcccctgcatatccaggttgtcagccacctgagacgaccattgccagaagcgggcggaggggacgaggcgtagccgacccgaacgagcgacggtcagcatggccctggaatgacttggtttctccaagtttaggtggactctgtcacggcgacgacctcttgtctgctggcccggtcgcttagctgctcgtctcaatcagctggcgcctgtcgaccccccgcatccgagcgcggccgagctcggccaaatcgtcgacggcccaaacctcgcgacggcgtcgagccccgactcgacctgactcgacttacggcggtcgctcacttcagcataaaagctggcagaccttcttcgtgctctcatctctacacagcatcagcccactcgtcttcgcagccatgcccgccgccacctacaagaacgcctacatcccgcctgcgccgctcaagctcgagcgcgacatccatcttcacacgccggccgaggactatgacctcaacttttgcctgacgagccagcccatcggcatcctcaagggtgctgaccacgaggttgagctcgagccgcttgtcgtgagttcctccctttccctggtttcagctcgggcagcagcaacgaccgtctcggagggagctgagggctaactgtcgctcctgcaccgccgctttgtccgcagccgagcatgcacgcccaggacctcttcgaggccctctcagcctcgccgccagatcacttcaagtacctgccctgcacaccgtggagctccctgcaagagacgctcgggtggatcgagacggtcagccgggccgagccggtgcgccgctactacgacccgaaccgacgtctcgcacagctgctgaacccccttctgcctcgcttctcctggcagacctccctcttctacatcatccgggacatcaagggacccgagcgtcaaatcgcaggcatgtgcgttcttcgaaggctcgagtccacctatcgaccccgaccctgactgacgaggagagctctcgccctcctcaggatgaactacctccggacctcggccgacaacctcatgtcggagctcgtgagtcatcatgtgctttgctgccttctgctcggccctcgctgaccctgcctcgcgcaccttagggctggatcataatctttccgaaattccagcgatcccacgtcacgacgcacgccgccagtctcctgctcgaccacgccttccgcctgccggccgacggcggctggggtctgcgtcggatgcagtggatgggtgcgtgtccctcctacatcgctctgtccgcatatcgcctgctgaccttttcttgtccgtcgggcatgctgcagccaataacctcaacaggcccagcatcgccgccgcccagcgcctcggcttcgtcctcgagacgcccatctcgctccgagccgaccgaggccttgctccgggccaagctggctcctatatgggccgggctggcgacccgctcggcctcaagggcgcgcaggtcggccggagcacggctctgctctcaatcaccgctcaggagtgggagaacggcacagccgagcacgtccggtcgcttgtgacgcgctacaagaagtgatggctgagacagcgtcagcaatggctcgcgggcgacagggggtcgaaagccaagggccgtgcgcacctcgcgaagccgaggccttctcgccgttgacggcgggccgcaaggcgactcgcgtcggtcggcgctggtctgctcgccagcaccaacggctcctcggccgaccttggcgtcaaggcaagcggcctcgagctctgggacggcctcatcaatgcctggccggcccgggccgagaacacgagccgtggcctggtctgggacggtccgacggcctcgctctttggcctctggaccggcatctaggcgtcgccgttcacagcatcgacctgatcctgtctcccctcgcaccgttcgaccaccggcttcgatcactcgcactacagcgcctcaagaccgcacgttcctcgcggacctcgttcccccgccagttgcccttccctttgtatcgtgatgctcagctggcttcgccctggtggtggtggtggtgatggttgacggtttgatggctctactttcggtgaacagtggcgcttgagggtcgtcgagagggaggtcgtgcggagggagcggctgcagcggccagctggtcggagtttgaacccgctcgccgccgctctgtcgacttggccccgcccaagaagacgggacgaccgaacgactcgaggaaacatgcatcgcagaaaagcaggttgggcgaggtgccagaggcgatgacagtgactgagagagcgttttttggacgcctttggccgtcgcacgggccctgcagcaggtgccgcatgccagttccaaagactcgacgtcgtttcgcatcagggcgacgtcagcggcaggatgtccatcctcttcgcctgcgtattgtgctctcaagcggtagcgcacgatgggacagggggtcagcgagctcagtagactggtatgccggggtgatcgcgcgcgaaggagaccttccagaccctggctgcggcgacaggtctttcgcgccgaagggcatcctttttcgtgagtctggcttcggtcgtgtagtattcagtcattggtcagaggagataagtagtgcgttctgtgaaacttggctgcgaggaagctgtgcaggagccagcggtcgtaaccttgcctaaggctcggcgccgaacagcagagccgtcgttatgctgaatttgcgccacaagccggaccgctggtgccgagagccagactggagccttgtagcgcacttggcggagcaaaggctggacagtctcgtcgacgacggggccgagtcgtgcgatgggagacgaggcaacctccgagcaggtgagtgcgaagcacgggttgcccagtcagcgacccgtacatctgatcagacctggacctgattgagcgagcagtcagctcatgccgagaggttggaggccggctggatatcaaagagcgagtgaaggtagaagtcagcttcgaggtcgactcgacggacttgacgggcggcggctgccacagaaggtcgtcgcaacgtcggcccgcgtccggctcaaatgcttcgccgaggccgaagcctgttgttcgagcggccgctgcccctacttcgcaagatggacctcaacagccactttcatcacacctacggcatcctcttcttttgccacgacctttgagcgaatcatgacccttccaactggtgagcagactccgctgccaaacgctgcgctgcaggggtcgaagtacgacgccgacgatcacccgagctacctctgaccatctccggcctcgtccgtcctacctcgccaggcatcatcgtcccgacgctcgccttcttccaggccggcgagcggcaagaggtcgacctgccgtcgaccggcaagcacgccgtcttcctcgccaaggcaggcgtcgctggtttgactgtccacggcacaacgggcgagcccgctctgctctcgcgcgacgagcggaggggaattcttaaggccacgagagaggcgcttgacgaggctggctttaagcggctgcccatcaccgccggctgtggtgtcagctcgacgtgagtcctccgttcctcctcctgcctcgacttccattagctcggtcttgcctacttacgacaacgacgaccgggcgaaatagaacttcccttcccacacttgtgtgaccatggctgacctacgcgtctttcatttgacgcgatcctcagctgggagacgatcgagctctgcaaggaggccaagacgctgggagcgacgtacgccctcgtcgttgcgccagggtactacaaggccgcaatgtctgacgccgtgctcgaagagtactttaccgaagtgcgctcgaccgaactgttctctacctagagtcacttggggctgacaggacaactgcttgtggcgttgccaggtcgccgacgcctcgcccattcccgtcctcctctacaatttccccggcatcagcaacggcatcgaccttgacctcgccctcattgcaaagcttgccaagcaccccaacattgtcggcatcaagctctcgtgcggcaacgtcggtaaagcggtgagtctatgcagggaccgtgccgcagcctgttgactaggcgtcgacgaccgcaatcgactgaccgggtgccccattcctctttcttgcgtacgacgactcgacaggcttgcctgacgtcactttttaagcccgaggattttggtgtctacggcggcttggctgacacgattctccacggcctcctcggctcgtccggccttggcgccgtctcgggcctcgccaacatcacgccccgggcgtgcgtcgaggtcgtcaagctcttccaggcaggcaagctcgccgaggccaaggcgctccagggcgaggtcagcctcgctggccgggttgagctcaagggcggcgtgccgggcatgcgctatggtgtcgagaagtacatcgggtacggcggcgtctcccggcggccgctgcctcctgcgtcggaccaggtgcgttaagaaggtcgcttccgacttaggccatcatgtgctgacgagaattacttgactgcgaatcctctctcgtgcagctcaagaagtcggtcgaggagtgggtcggcccgctctggaagattgagcagtcgctggcctgaacagctctcgcggtcgcagttgatgacaatgatggtgcacagacaaacatgagatagtcgactgagatgttgttgcgcctccgacgctggccattgtccttccgagtccccttccagaggagagctcgacggccaggtcagaaggtcgctgccgcctccagggcggcgtccatggcgagaggcaggcgagagcacctccggggcgctctgccacattacgcaagggctgctacaaagttggattgaatggggaaggagaagggggattccgaggctctctcaagccttgttgtacagcttgaccgaggcgacctcccaataggcctgctcgaaagcgtggccgacgttcttgacgtactcttcgcacgtctgataggcggcgcgggttgggaaggaaggggacgtatatcagccggggttcgagcacgacaggtgagaggacggagcgagacgcacggcgtagcccgtcttggccgcgcacgactgggtctcgccggccgcgccgagaccctgcttccacatgccgccggcccagtcaccgcagaaggtgttctgtagaagagaggcgagcaatggagtcagcttgtcgccctggctcttgcacaaagggccggcgagggacgcacgctgaagagggcgttcatgttggtgaagaagtcggccgggttacacttgtcagagacaaagcgcgcctggggcgtgccccacgtcgacgggtcaggcgagctcgagcgaatgtcgccgggaatttggctgcgctgccagtgccagacggtgacgccgtcgttgtcgagcgtcactgtgagaggtaaagggtcggacaaatcagcgctccggcaattaacggtcgctcgagggatgagcacgcactagcgtagacaccgccaccgaccgcgttgaagccctcgccgtacgaagccgtgttactgagcggcgcacgcgcaccgcagccctgcgcaaggcgaaagagagctttgatcagtttcgatcgcaggcagcgcgcaaacaagggccgtacctcgttgttggtgtgggccgaggcgcagtcggtgttgacgaaccagccctcggtcagctgcgacgtgctcgcgagctggttcgagggaagcgtgcagccgggagcagtgtgaatagaggcctggttgacggcaaagttgttgacgccctccatgactggcaaatcggatggaaggtttagtcagatcggttcaaaggggtggcaggcgagaggggtgtacgcactgtcgatctcgccgccggcaggctataggacgcacgagcagtgtcagttcatcgctcagtgaagtagggaccgcaaaggacgcacccaggccttgtcgccgagcgtccagaacgcgggctgcacaatgggagaacaagactcgtcaggacaccacctgcgatcactgtcaggcggtaacgcaacgcacccaagttccacagccagtaggaacgtgaatggcgtcactggaggtcaacgagatcgaacgtcagcgttgcttgccgcgatgtgacgcaccccgcgagtgtacgcacaggatgaggagcgagccgacgttgaacgaccactccgagctgatgcggaccgcctgccggccgtacgacgtcttctcgttcagccagtcgacggccatgatcgcgtgctgctgcttgttgatcgcaatcaggttctggttccactgcagaaggataaagtgagcgaacagtgtcagtctacatgcgagtgactgtagaagtgcgcaagaaagatcgatcggcaacgcacagccgaggcctcgtcgacgtatttgacctgatggaagaggtcaagaaggacagggcggtcagcgagacgcttgagtttgatccgcaggcttgggttcggtcgccaagcagcggctttaatgccgctgctgctggccctgccggacgcaaaggaaatccagcgacgtacgaatccgtgggtcgggtccgggccagtgaaaaactgatgacgtatgagcgaggcgacaaaaggcggacgagagaaggtcagtgtcagagccgtttgagcctgctcgcttttatgccaagagaactgacgctccagtcgttgaagaacgaggcgccctcggccgcctggctgaggacccacgaactccgcttcttgggctcagccggcgcgcggcggccgacggtctggtgtgcgcccgaacgcttgaagccgtgcggggtcgggccagccgaggtgagggacgccgagaggaggaaggtcgccgtggccagcacgggcaggagggaggtggcgcagagcatggtcggagggaagctggaggaggctgttgttggagagagagagatagaagaggggaggtggcggggaccgacgtcaagccggagagaagaagaggacgaggacgggaaggagaggaagatggaagagcgtctttgggaaaagaagaagaagaagaaggaggtgaaggacgtgcctgcctttgaaggttcgccgagcgagcgagcaagagctcggcgcgccgataggaggcgcgagccgcccatcacgatgcaaaacctctttcgccggccacctcctcccgatgccatttcttgcggcagaccacgaaaagagtagcaggctgccgaataacgcgcactcgctattgcctagagtaagctctcaacttccagctgcgagcgtctgccgacagctgaacgcgctgctgcggtcgggtcgatcaacatcgacagcagcgcgcggggcctcccgagcgggcgcggggtcggcccgggcgcgcagccagtatgattctccttcttaggaacctcaatagctcatgtcatacagctcgagaggggctgtgacttgacgggtatactcttgagatctttctcggtattcgaccaaaaggaaaaggtcctaaacacttttggcgttgtagggcggctcgccaaagttggaggtcggatgacagggctctcagacgcgccacaaagggtctcttctgcacgaccccggcgttagcttcggagaggccgcagcacatgaacgagtagcggcagaggtccaggcgctacagtgaagtgcgtaaaggcggtccgtcgagtagtattgcggcaacaaccaagttgatttgacgcaaaaaaaattggtttataaattatagatctcggtcgttaacaagcaacgtcgataaccaattggttaacactccctctcgttttctggagaggccggttcgattccggcatcgacctgttaaacggttgattagtatatcggccagtacgccagattctgacgttgcggcgttgttttttttgccccctcgcaaaccgtcccgcgatattctcgtttatttcccccaactccgctcagattggcccacgcagggtgttaccggaccgagctccctggctattgcctgctacaatggcatcgcatgagagttgtgttgagagtcgcagcacggcttcgaaggttcgcaggtacaggggtgcgcgtgcgcaaccgcaactaaatcgtgttgccacagtaggccgtctcgttgcagaacgctggtatgtacttgatgaaggaagatgcagatctagtcagggggccgaggctgggtagccagtcaactttcgatgtgagaatccggtcgtacgaatggcaaaagtgtccccccgctaagatttctgacgcgcgataacccgggcaaacgaccgtctctccgactttctcacacttggattcgcatcgcaaggtcatcattggtcattgggcgaggctggatggtcatacagtgtgaagtgtgcgggtcgtcaacagaagctaggtgccgtgcgcgccccgcttgacgacggcgacaacgaggtcgtctccgagccaggcgccgcgccactcgacgagccgacgaatctcgcgccaatggtcgtcggcgtcagggccggcgccggtgcctggagcgtaaaagacaaagtcggccgggctcaacagagagcggatgagcgagcctaggaggaacgagaggacgccgacgagaagaagcgtcgacagtgggaagagacgattgcgcgggatccgatcgaacgagtaggtcgcgagcatgttgctgagtagcttggtcccggtcggctgagtgtcggccgtcgaggtaccggcgttatgcttctcaccgatacggtgaccgccgggcgtaattgagccggtccgggctcgggtgaagaagctcataagtgggttctgcgccgacgacggtcggcgcgaggtaatgggtgtcgacaggacggtgaccgctcgggaagtgtcggtgccggtggcggccggttgggcggagctctcttcagtccttggcgtcgccggtgtggtggctggccccgaaggagcgagcactggcggatcggggtagaggtgtgtggcgacggcaattggtcgatccaggccgcgaggaagcgacggattgtgtgcaccggccgagggatcggtgccaggcgagacgagcgtcctgcagggcacgggttgcgaggtcagtcttcatgttggccgtctgcgaagctgctcggcgaacgcacctcgtgagtcggggccagtcaaccgcgacgtcgtcgtaggcctctgacttgtcgtgctttgcgaccttggagcccgtctggctcgcgccaccagagacgacgatgacggcgccgttgacggtgacgaggacctcaccctcatcgtcgtagggctggccagcaagagggtcgagattgagctggacgacagcaccagagccttcgagcgtctggtaccagtcggggcaagggacgctcgtccgttggtcaccgcgcagcgggtcctggacctgaggcttgctgaactggcccgtcggcagcgtcaggcgaatgagatgccggcggcgcggtggcgaggtcgtaagcgatgccgagtgcaggactgagggcgacagggacgagacggtcacctgcagaggcaggcccggcagggtgcgcaggccgtcaaggacgagcgggagcggcgaagaggtcgcatcggacggggacccagcagcggctgcggccggcagcttgaacaaggtgctgacattgtacccggccgggaaggaccgcgtgtcgacaatgagctcggcgacgaggagatcctcggcaggtgatcgcttgactgcagccggcttgccggacggtgccgcaagcagcgttgcgttcgagccctggctaaaagtcgaccggacggagctctcgctcgcgctatgcggaaggcggcgaccagactgattgcttgtcgtcgagtcgtttctggtgagcgtgcctggcgctccggccgacgagcgaagggagctgctggaccgagcccgactgagggagctcgtcgaagacgcaccgccctcgcctggcaggtaggcccatccctctggcaagggcagacgctgcgcagtaggcggcacgggtgttgccagcgcgtcgcctggggcgttgatgcggacaaggtaggtcgaccgatactcggcctcggctgggtcgaacgagtcgccgataaaaaggcgctcgtcgtcgacgtcatcgagactccatgacttcatctggcctgcgccgttcgagggcgacgacgacgtcaggtcttctttgtggacctcgaagttgacgccggcggccgggaagcggatgtgtggtgcggtgctgcgcttctgaaggaatgtctggacgcctaggatgagagtcggcagcgtcgagttgagcgaggcattcatcgcggttgggatcgagccggcataatcgacggccgagaagtaggtgcacctggtcgacggaatgacaagcgactcgttgccgtacgggtcgacgttctggttgcagaaacggtgagggcggtcagctatcgcgacgcccgaggcgctgttccaaaacacggacgtacctcaagcacccagccctcgatgagcatctcaccaatcggcagctcgctcggattgatcttggctccgtcgaacgccggtaagacggctgggttgaaagaggattggacaaagtagagagcgctcggcgcggccgacgatccggtggtcggggtcgaaggcgacgcatcggtgacatgagccgaggctgaggcgacgtagaagccgcgctcgcggaacgggaaggcgcagcgcgaagtcacaaagttgaccgcgcagccgctgccgaacgactggagcggcgtcaccgaccccgctttgtcgtcccagagacggcgggcgcctggcgttgagacgacgctcgcgacgtcctcggccgagaagccttccagaaccttggaagcccgatgcaccgggtgtgccgttgagacgaaaggcgcgatccgcttctcgatcagcaggccatccttggccgtgacggtcgaccagaactccttctcgctccactgggtgtggaggagacgaaccgaatcgagcgcgttgagggcgacctggacgggcggtaggggcgccattgctggcgccttggtcaatggcggcggcaggatctgactgacgttaggcccgaccggcagccagcctcggaacagcggtgaagttaggccaaatgttgccgttagcgcgcgacggactgggtccggcccgtcggttgcgcgagttccggcgttgcctgactgcggcgggttggacgacttgcgcgtgcctccaacggccggcggctggtcaagcgggattcgggccggcttggtccgcttctgcttggctagcgtcttagcctggacttcgggcagctgctcgacgtcgactttgatcttggcgccgttgacaacgacaacgtgcttgtccttgctgccctcgcagcgggaacccttgcggacgatgaggagcaccggctccttgtcaaggaggacggcgtcatgctcgaccgtgatccagcagccgcctccacccgccgagagacgatggcggcgcaggcaggtgactgacagaggaggcggatcgatgacgatgtcgagcgacgaggcccaggtgtcggtgtcgcatcggagctcgcactctacattggggatcgggccgtggtccgggtcggtgaaacgctctttggcggccggcagcgaggactcttccagcgaggtgagcggcgccgatgagccctcggctagcgctcctgagacgatctttgaccggcgccactcggccgactggtactcgacccgaagcatctgcttgtcgaggtcaaatcgcgagctgagcacctttgcgtagccgagccgggtgaccatcggaggtcctccggcgcgtatcgcaaagtcgccaatgccggcgagcgctgtagggagagcgacgagcgacgatagtcagcgctcatgaacgcataagagaaagaggggggccgactgactcgtcgccattgtctgcgggatcgagctcttgttcgtccagcccttggggtccgactgctcgagcatcgtcacctgcgttgtattgggtgagagtgcctcgatcgaccagccgagcaggtcgacctgcgtccggatgacgcttgggttcatcggcgggatcgacgggaagagggtcgagtcttcggtcgaaaaggcgaagaggtggatcgacgtcggcgacttgtaggtcgtccgcagatgcacgctgtcgcgcggggcgaccggccatgccgccttggacttccaccaccagagctcgctgagctcgttgacgtcctcgagtagcatcgcgtcttcgtgactcttgtcccaggccggccgcgcacccgtcgtgctgacagcggcaagcaggtcccagatgccgacgccgacaaatacggcctcagccctgtagacaacgagcgtccggtcgatcgagtcgagctgatggaccgacacgcccttggcagcctcaagcaccggccgccacttcgcctctggctcttgaagcagcgacgtgaagtctgacgatacaaggggcaagcgtcaatcgcagcgcgatgatcagcagaatcgcaaccgtctggacgacgcacagatgtagttgcgccggatgagggacagaacgctcttctcggccttctctgaccgctcaccggccatcgagcgacggccgatctcctctccgcttccgtcgtctcggtgagcgagcccgctgtcgacactgctggcgatgctgctgatcgtctcgatcgtattgagcgagacgccgctcaggctcgccgtctcctccccgtccttggcgccggaaaactggcgcgagagccgcttgttgtcggccgagctaaatggggctccatgcgaacggtcgagcgggatcgtcgcaaccggctgcgagacgccattgagtcggatcgccttgcttgcggtgtcgcgcgtgatggtgatcttgaagcgaagcgtctggctcgggtcggcgagcggcgggtgcgacacgcgcagcaggaggctcgctggaggcgccggtgtcgggcttgtcgacttggttccctcggtcggtggagaagaaacgtgcggtacgaagcggccgatgaaagctgaccaggtcgggggcttaccgtcgtcctcgccgtcgtcgacggcgtgcagcgtcacctgcacccgccagccctcaccctccggcaacgcaaagtcgagcgtccgctcgacgacctcctcgtcgcctccagtgacatacccagagcctgcttcagagctggatagcgagtcgaccgcctcggtgacgacgcgccagtcgatgctgagcgcctcgtgccggacgtcgaatgaggtcgcgccgagcgcgacgccgcgcccgtagccggttagaagcggtatgcgtgcgcgataatcgcgagccgtcttgacaagactgacgagcagcgtcggcaggtggtagccgagcgaggagccgacggcccacgtgccctttgggttccactgccagaacacgctgaccttgagagtcgcaccagcgcctgatgcggcggccgacgacgacgtgccggctactttgtccgacgggactgttgtcgacaccttgggtagctggacgcagaaagcaagtagcgagacgtcggctcggacgaagggcggggctgggcgtagatacgctggctcgtcgggcgagcgcggaagggacgtcgagacgttgatgaccgactcggcatccgaaaacgtctttgagatggtgatggtgtcgcgcgggctgagtgcagacgaaggagggtcaggtgtttgtcagagcgcgtcggcagggagcacggacggttgcgcgcacctggaaggccagcctaggcggtacgccgttcggacaatgcgcgagtcggcatcgagttgctcaaccgtttgggcgctctccaccatccggtccccttgagagtggtggaagactgtcagcacttgtcgtgacggatccgacgctgctcgtccgcgtcataaaaggaaacaaccagcgactcacagagtgccctgacctcagccgtcgccagcacggcccggaagccttcgctcgagtactcgctctcgttctttacgcttttgccgtccggaccgagctcgccgcggacagggacctcgagcgtggcgcggtagacgtcgccagtcttgccgctgcgccggtggacgacgacgttgttcgggtcgagccccgagctcgtcgccggctccttgcccttgcgcgacgccgccgcgaccagagccgctgcagcttgagctgacggaccgacctgaggcggtccggcggtgctgccggatccgttcgcagatggaatggtgatgggcttccatgcctttgacgacgacgacgagagcagggcgcggaagtaggtcgccgacgtctgcagggctgagatgtaggcctcctgctgcctgttggcgaggagtagcagcgcaaggaccgagctaatcagagatagcactcactcaagctgccatagcccgccagaaaggtaggcgtgggaggaggatgagctcagagcgaggcaggggttgtctgacgtactgtagaccgtcgagctgggccgccgtcgacttcggccccatcgcgggaggacggcttcaagccaaggttctgttgaaatccggcgctcgagcagctgttgcagaagagctgcgaaaggtagaaaccgagctgtcgaccgtgctaggtcgtgaagaggatttggcggaagagaggaagatgacaggaagcgaggtcggaggtagagcgcggcacactcgctgctgcgctggcgaagtcgctaccgccggcccgccatcatgagtcttagacgggcgccccggaccgcccatcgcgacttgttctgcaaaattcaaagtgaggccgaaagcaagtcttacgagtcggcatttatcgtcggccgctggtccctccgacggcggttgccgtcgccaatgggcctgcgcccgacccgccgccgactggaggacctccgaggccgttcctcgtccagtcgccaaggacctcgacgccgccggcccgggtccactgctcagcctcccaagcgacctcctcatccctctcggtcccgccgggctggctgcccgtcgcgctggcaacttgagcggccgaggcgaaccgcttgcgccggacctcgcgcgcctcgtcccagcgctcgcgggtgacttcgccctttgcgcctgcccggagcgagccagcgagcgacccgccgacccaggcgagcagagagggcgcaaaggccggtgcgctgcctgaggcgccgacggcctcgggcgtcgggtcgttgaggatggcgatgtgcttgcgcagcgccaggatcggttggtgtggatgagacgcttctggccgccggcgggacggaggcgtcatcgaagtcgacaccgccgcttctggaggggcgagagaggccaagagtgaggcgcgcaggcgagggataaagcccggcaggtgagccgtcccgccagtgacgaggatagacgaggccagtggtaccctcaggtcgatcggcagctgtagccacaatgcgtttccgagtcagccggagcccagtcaatggcgatgcctcggtcaaggacgcaccttctccaggacgcccaggaccagctcgaccacgccctcttcttcgcgcctctcgcgccgcccgtcggtcgcgatctctgcgacaagctcttcggcgacgcgttctcggatccagccggggacgacaatcgtcccgcccaatagaccatcgccgaccgacgccgggacggcgagccgcaaaggacgagcggtcgaagtctgagcgaagcgcgcgtgaagggtggccagatgaggaggaagagttggcagcggcttttcagggctgccggtgtccggatcgcccgtgcctgccgtctgggcagctgcaggcggctggtcgatctccatcggctccggagcggccaattccgagctcgagcggtcatcagcgggcgcgacaaagcagccctcattcagtatccggtcgaggacgcctcgcgaccgaagcactgcgcgcgggatcctcgttgcttcgcgagcccgtccgcgagggcctccaagcgccgctgcggccgagagcgtagcgacgggcgggacgtaaacgccgaagtggagaaggagactgtagagtgtccggaggaggtgtcggctcgcgaggggtgaggacgccagcagcggatagagcgggcgcgagaggtgtatctggcggcacgtgcaggcaggcaggccggaagcaaggtcagctgtcgttcgacagtgcccttattcagaatgaaggccctaccgggagaatcaccgtctccagatggccgacatcgacgacaaggccggttgtccgacccgttgcgagcaaggctagcagctgcggtgggaagaaggagatgctggggacctgatcacgagcgagagtgacgtgacgcgccgggtcaacgcctcgctttcagccttgcagctggagaggaccccggcctccaacaaacggcaacgcacctgaaagtcttcaaagagccgccgggcgatcatctccttgaaacgtgtcggcagcagcggattttcgagcacgatgaccttgcgcgacttgggatccgtcatgaggtgactgcgcgggacgggagagagggtggtccagccatccagggtcagcatcgtcatccctcgactgagaagcaggatgctggtgccctcgtggtaacgcacttgtcaaagacgtccctcagccggtcgccgatacgcaggtcgaccatctgctcgccgacttcccggagcgcctgcgcgtcgagtgcctcctcgtcaggctcggcgttgtcgccagccgactcatggacgtcgagcccctcccacgtctcccagcgctgccaccagcgggcagcacggccgtctccacgggcgacgtcctcgaactcgacctcccagatgccggctggggccggggcgttggccgggcgggcaaagaggaccttgcgcgggttggcctcgcccgagaagccgaccttccagcaggccgagccgaggtcgagtacgatccggtcatcggtgccgtagagcgagtgccgcttgtggtcacggacgacgtagtgcggcgagggagccgtcatctgccttggcaagctggtcaggaggaggtgagggtcggccggcgtcgtgagctgttggcgctgcagcctcgagaggctcgagcatctcccaacagccataccgtcgccacccctcccagcctctccagccctgtcctgaacgccgtcagccccatcgccctgctctgatggccgcacccgcttccgactcgttccgggcgcagctttcgcagttccgctgggcgtccggccagacagatgactcgcaggcggccgcagccccttctgggcccggcggctggtggaactccgtctcgtcgagcgtgtcgccctacgtcccgctccggagcggcgaacgaacgaacgaggaagaggcctactttgcgctgtcgcgctgggagcggtcagtctagtcgtgctcgtctgcttgtgacaggaaggcctgacgctgacctcgtgctcaccggctcgcctaaggttcgtcgccttcctcgcttgcgtcgctggcggcctcgtctgcttctttgtcgccttcctcacgatcccgatgctcgtcctcaagccgcgcaaattcgccgtcgcctttacgctcggctcgctcctttttatgggcggcttctcggtcctgatgggcccggtcgcccacttcaagcacctcatctcgaaggagcgcctgccgttcacggcagcctactttggcagtcttggcctgacgctcttctttgcggtcggagtacgtcctcctatttgactgctgcctttgtcgatgaaggtccaaccgaggcggcccggcgtaacgcgtcggccagcggtcgcctgatggtcccacttccgcagcatcgtctgacccgtccggtgcccgtctgcttggatctacagatcaagagctacatcggcactgtgattgctgccgtcgtgcaggtcgtcgctctgctgtcttatctcgcagcctattgtaggtccccgttcgcctttaagcgtcctctgggtccgcgcgcagccgaccagaagactgacgcttcacggtgctgccttgctcattgcagtccctggcggcctgacgacgctcaagttctcgggccagatggttgtccgtggggcgggctcgtggttgccgatctagcctgctcagactggctttgtacaatatgcaaggggtcgaatcctagcctatcttgccggccgcgcattcgcacgacggcccgcgctttgacgaccccagacggcgctcctgatcattatgagcctgaaggtcaagctcagcgcgtcgcgtccgtctgcgctcgacgagacgtgacaagcgcggggacctggacctggacagcgcgcttcaggcgaaggctgcacatcctgctggcaccgctctcagcttaggccgggcgccccgaagtcacaccttgcgccctcgtccctcgctcgcgccctcgccggcgagcccaggaagtatgccgcagtacgacccctccgatgacgaccgtgtgcgtctcgctcgccgagcgaccgaccgacccgctagacgagctggcctgagcccgcgttcccaacagcgtccaaactctccgaccctccaaaacacccagcccctcgactgacagaggcggagctgcattaggagcgctcggtgtccgggcacgtgcgcgtggaggtcgcccgaaaagcggccggttgcagaacgctcgtcgccgatgcgaggcggagcgagagggcgggtcgtgagagagtctgccatgccaatcgaacagccaaaggaggaaagagggtcctctacttcttcttggcaggctcgccagccttcaccttcttgacaccgcggaccttcttggagcggttcttgcgctccttgcggagcttgcgcgaggccttctcgaccttggcggcaaggccggactagagaggcgagccgatgaaaggtgagcatgtcagccgacgggcgaggtcaagggtcggagcggcaaggcggacgcacgcggacaagccggtgccggggctcgaacttcttctgcgaggcctcgtcatcgtagatgagggcaaagccggtcgaacggcctccaccgaagacggtcttgaagccgaagcagacgacgcgggcggcgtcggccttgtacatggcggcgagcttctccgaaagctcggaccgcgagacgttgggccggttcgggtgcaggacgtcaagcacgaactgcttgcgggcaagcagccggttggtgatgaacttccgagtacggagggtaatgggggcgtccgactgcaggcgagcgagagcggagggtcagtgaccgccttgatgatcatggcctgtcgacgaaagctcctccccctggcggcgccggccttctcgatccgccctggtccacccctacgccacgccgccgagcctgcacgtgctccgctcctctcgagcctctacccgcaacttccatcccctccttcccctcgaggtcccggcgcagacgctgcggcaggtcgggagcctgaacctggctgatgggccaggtcgtgcgggcagaggcgcgcatgaccgctccaacctgccggctgctccggaggtgggctgcgagctcgatccggatgaggccagactgaccatgttgactagctgctgggtcgggtcggcaggagggcaggggagagcacaggttcgaggtgaagcggtgacgaaggaagaggtcggcaggagcggccgagcaaggtcgatcggaggtgcaggtgcagcaggcagcagcgggcagcagcggacgagccagcagggtggcgacagagacggttccagcgagcaccggcggtacgagcaaaggttcgagagcacggacagtcagcacgacgtcccgccaggctgctcagacgttgccaggccgcacctatggaacgactgccttgatgaagttgcacggagaagcaggagaagcaccgactacacgcctcgagctcgacccggcggcggcgctcgctggctccggccgcgcggccgagtgaccgcccccagaatcgggggctggtttgggaaactacaaaatgatttctcccccgcggggtcggggcgcccgcggaaagcggttgtcaagggtcggttctcgagtcgattgttgcaggctcctcgctcttggggtcgagccgtcaggctagggagctagagacgacagcaggctgggcggatacaggtcgtgtgcgaatgggatgaggggcgatgccgagcaggacggctggaaggggtcgggtggtctcgcgggcggggacgcgccgtggccacattccggctgtcgctccccctacaagcggccgtacgtctgcgtcttctcgtcctgctgtcgcttcgatgcacgtcccgatgaatctttactcaatagcgcgcatgctgctactctcccgctctgacgcatttgaatcgtcccggcactcatcgtaacacctgcgtcgcaacagcgcaaaggggcgcatcattcaggtcttggcggatgagggcgttggtaagagggttaggagctctggacgatgcttaagggatgacaagtggccatgttggattctcgaggcagatgaggtcagcgcaggctagggcaagccctcccgtcgggcggtcgagctgggtcgcgacggcatcgcaagcgatcaccgaccgtatccacgctcgccttcctcgcgtagagcgcggtgttatacgaccgtctgaagcgcctctttgtatgcgaggccggcttctcctctttcccaaaaggggagtgtttctccgccggcgaccttgcgcgcacgggttgcgtcgaaggccctcgtcttgcgcaaagcctccattatgccgattgagtccctggccatccattgccagcgtctgtcgacgtcagcctagaatgaccgaatgagctcgttggcagttgccatgctgaggcgacgaccgcagtcgagcagccgctccttccatcgctgcgtccgacctcggcctggttgccgtgccccgtccgatctcgagacgacagggtcagccgaaaccgtcacgatccagggctgtcgatcgatattagcatgtaatgtcgggtcagcggtcgagatggtggttgtctggtgcaggagggccactcgccgctgatggacgacgaagacgaagtgactgacgggcgctgaccgcctcgactattgtccgaggctcagtggttgtcgtcgtcgccgctggcagggaaccgtcacgcacgaggtccatctcgatctgagggcaacctcgagcgacctcgacccgcgggggccgtcctcgggacgacggggtctgcccaatccggcctgcctccttcagcagaacccgtcattactggatagccaagccatcgttcggtgtcagcgctccgtcggcggttagtgagcgtctaaaggaggtcaaggtcgccttgctgaaggcagcctcgctgaaggccgtatcggaagtacacgactatgtgctcccggacgactttgcctttgctctggtcttcgcggcctacagcctgctcaaggacgcgaacgacgccttctgcgactgggccgccatcctcgaggacaaggccgacaagctcggggaagaggtcgcccagctcaaggcgatcgtcctcgcgctcgggctcctcaacaagaccgcccccttcggcgaggagccgtcggccgacactgccagcgtcgccctcgcgactggcgccgtcaatgaggagcccgctcttgttatgccggtcgttgtcgagtcgaaaccgacttcgcccgccgacgacgacactgccgccgacaccaccctcgtcgccgccgactttgcttcgacgtcgtcgccctcgcgcgaacgcgttcggaccgagtcgaactcgtcggccgtcgagaccgcggccgatgaagctctggctgatgaaactgtggccatcgacacccataagcgggcccgcctccttgccgactcgagcagcgaggtcaagcagctcctggcagagaccgagcccgagctcagtcctaattctgttcgctgacgctccgagcctctgactgacgcctccgactcgcccagacgacgctctaccgcctccgtcagctaccctcgttcgatccgttctcgcttccgcgcttccgtcgactccctgcaagaccttcgcctacgtcgactcgttcgctccgttctcgtcgccctgcccgccctgcccgaccttccgccacgccgccaagctcggcaccggacgcggcaacgcccgccattccagtaacgaggcctggtaagtaccaaggactactagacacccctttactctcctcttcgactttggactttgcctcttcttccttgcgcgcctcccttcctttgtttaacgaccctctcgtaatgccgctgcttccggattcgcatggctctccttctcacactcccgtccgccgtcagcgagcgagcgagtcagctggtcagctgcgtcggcctcttgtggcatagctggccgacctcgtccttgcctgcttgaccttgcacccttcgagggccagcgctcgtcaacaagctagagagacattcgatgttgccggcccttccatcgagacggccgtgatcggcccgacctgaaggccgcggcctcaaagtgccatccggccgaccttgccggcaagaccaccagcgcctgccccggcgccgacggtccagaggacgagccgtccgtcgacaccgctcgtcgagaagcgcgtcacctcgcctgaagccgacgtctcaaacgccttgaccttggtgatcgtgttttggtgaaccgtattaagctcggttgacccactgccaccgctggcccctccggtcgctccaccggcgccgtggctcgcaccgcgcgagtcggccgaccggaacgtccggaaggcctcagagttgagccggccgacgccgcccgtgttggagggcgtcaggatgccgggctttgcgccgccggcgactgacgcgtcgagcgacttgacgagcgaccagccgtcctcgatcgagcccgagaagaggaccggctggcagtcgtgcccggcggcgacgagcgacgtctcggagagccagagcacggcgacgtacggcagcgacggcgtccggacagtgtgcaccgcctgtggggcagcatccgggccggaagggtagacgattgtgattgacgagtcgtggcctgcgagaagggccaggagaaagagcatgggtgagctggtgcgacgagacgccaaagagcagcgccagacgtactgcagaaagcgagcgcatcgcccgagggcgagaaggcaatgtcgtgaacccagccacctgagggcgagccgtactcgccgcagacggcattgaatggcagcttcgagccccagatgttagcctggggcctgaacggagggaggcagagggcgtcagctttgtgctaaagctcaagaagctgaagtgacccgacgtacttggactcgatgtccttgatccaggccgagaatacgcgggccttcatgtcggccgaaccagcggcgaggaggatgttgtttgggtgccagtcgagcgaaaggacggtcgaccggagaggcttcttgagccgcttggcgacccaccagttgttctcctcgtcgaacgagcagacggcgatcgccctggttgacacgagagacaacagcaccggtcgtcagattgtgtatctgctgctgcggacggatcgctgccaccgctcctccagctcgcacgagctcgcccgccaagagcagatgagccagcacgcaccgagctcccgacgcgacggcgaacttctcctcggagggcgaccacttgacgttggtcgccgcccggttgatgccgaggatgacgagcgtcggcttccagatgccctggtcgttgagcgcccagacgtaggcgttgcggtcctgcgagcaggtgacgatccggttcgtctgcggcgcccagtcgacggccgtgatgagcttgtcgtgctgcgaggcgaacagaagaatcaagagctgtcagcttcgtgagggcgagctgcggccagtcatccagaggggacgaacctcggcgagtgtcaccgagtggtcgaagccgcccgagctgttacgcgtgtagatcttggcgacgttgtcgttctcgcagacgacgacctctgtgtttaacggcaagccaggtcagcaacgggaggatgcgagcacaaggtacgaccgggagggacgcacgggaccggtcgggcgagaacgagtgggcagtaatgggtcccgaagagagatggaagctggcgaggcagggcgagctgacgcgtcagctaagggtccgagcaggcccaagtgggtcgtcgaaggaacgcacacttcggaggtggccatgatgagggggatgggcgaggcgaggactctagcagtcgactctaggattcaggcgaagagaggaaggggggaaggagctgatggaggtcgaggtcggaggagcaagaggagccggcccgcgcgcggtcgacaccgacggccacggccacggccacgaatcgtcccgggcgtatgcacagaatccctcattcgagtcattcaatagacgatagcagggcctgacaggagcatagcatgtctactccccgcatgccgagagcgtccatcttactgaaacaaagggggctcacgaaagtggcaaaagaaaagctggctgcaggattcgaacctgcgccctcagagaggaattgatttctaatcaatcgccgtagaccacttggctaagccagcttgttgatatcctttttgtaacataaatctaattaatttcaagcgattgcagcttcaaagtcacaggtccgacacggcatccttcgttactacatgctcccgtcgtttttggacaagacccggccgtgtttgcggtctcggtgaaggcggctgaccgtcgctgacctccgacggcgacgcgcccgccgcacgcgcgcgcttcttcctccaaatacatacggtcctcaccaagtccctttcaaccctgctcacgcaggctcgcagacgctcgacgtccgtcccgttcctgacagacgccatcagagcggcggccccaaatctcgcctagaaaagctacatatcgcaggagcgcatcgacacagaccgaaaaagaagaacgagggaggaagagacgaaaagtcgaaagggcgactggaccgagagaaagagatgcaggagaatggacctgtgctgagacaaaggttcaccacctgccggcgagcgatttacccttgaggccgccgccgagggccgacttggccgacgacttgacgggcgaaagcatcgtcgggatgcccgagccctggtcatcagtgcggcgagagagcacgatgtcagcgggctgcgtgcgaccacggatggaaggggatgacggacctcgacgacgtcccaatcaaagcgcttgcccgtcttgagcagcccgccgccgagcttgcgcttcttcttcttctccttgacgacggccgtgccctcgccgtcgtcgtcgtcgttcgacgcggccgcgggtaactctttgcgcttggctgaagaagcggccttctttggcttctcgaccgctgcagcaatggcagcaataggaggtttcttggcgaccgacgccgcagctgcaggagaggagacggccgggaccgtcgcagccgccgcctttgccttctccttcttggtgaccttggtcgtgaccttggtcttcttgagtagcgctgcgggcgagtcggggccaggtgcgtcggacgaggggccggcgatggcgacgatcggaggtactggcttggttcgcttgaccttggccgccggcacagggacagtagcggaagggggcgaggacgagcggggggtggcaggcgccggtgcgggcccctttggcctcttagttggctggtcgaagaggatgtggcacgtgagcgagcgaggacggggacgagcgataggagggtgagacgaacctttggcttgacagaaggttccgcctcagcgtctgacatgccagcatcgtcctccgagaggtcggtccgtggtcgggcggatgcaagcttggccgcctggagctgtttctgaaggggtacgagagcgcatggccgggtcagcagccggtgtggagcgctcttaagatagcaagagcaagagggaccgaccttgagctcgcggacctctttctcgcgcacacgaagggcactctcgaccctcttcgtctcctcgacctgtctctcaacctctccctccctctcctcgacctcctctctcatccgccgctcacgctccctctcctccttcgccacctctcgctcacgcgccttgaaggcgctctcgacccgctgcgtctcggccacctgccgggcgacctcggcctccttgtcgtcgagggccgaccggagccggccaagctgcttcagcgcggacgagagcgaggcatcgagcgtcgcttcgcgctcggcttgggctgcttgccgttcggccgctgaggactggtcggtcgacctcagcttggcgagctacacacaagcatgaacaagcgaggccgtcgcgtcagtagcggctagtcatgtgcgccccagtcgggacaacacaggatcgaagcgcttgatcgctcgggaagatcgcaccttgattgacgcgctgcgctcgcgctcctcgagggcgtcaaactgccggtcggagcgtgcttcgcgatgcttgaagcggacgagcttgtggttgcgcatgactgggcgggagacatggagcggggggtcagcattgaggcggtggcggtgagccgacggccgggttcaaagaagtcaaagaagcgacgctgcatccaagatgggaagggaggcgacgcccagccaatcaaagaggagaacgagggacgcactcgagtgaatctggagcgtccggacctcctcgcgcaggctctcggccgcgagctgctcggcgaggagtgcgagctgagcgcgctgagcatagagcgcatgctcctcacagagctcgctccgcatgtgctcgccctcgcgccggcagcgcccaacctcgccttcgccctcctcagcccggccttttgcttcggctaggaggcccttgagctcggcaacctcggcgcggtgtcggcgctcggccgattggcgttgggcgatcagctgggcgatctgattctcgagtgaggtgagccgggcccggtggggtgccggtgtcgagggcgcgagcgggatggcatgctcgttgggcgagggcgaggccgggatgggcctgggcggcgggagggccatcgttggaagaagaggtgtcgcctggggtgttggtcgagcggcgcaacggcggccgcggagctgacgcgactgactttgcgcgctgcgatcgggtcggcgcgcctcctttcgtcctgtctgtccaatgcgttcaatcaactcgcgacagacagtcctcgccttctacccgtcacccttctcactctgctctctctctctcgcccgcgtcacctccctcgtctcaacgaagccctctctggttagaggtcttctgtccatcgctcctcgctgccagccagccccggtcctccctccctctcactctctccctcccgccacccagcgcgcctcctcccatccccactaccgtcatgttcgagcagtacgacgccgagcctgcgtttgactactaccctgctcgcttctcctcttcagtcggactctccagcagccaccgtcacctcgctggcctccgatcgttcgacatgtcggcgccgtcgtcgtcgtctgcctcgtcctcgatcggcggctcgtcacccgcggccagcgcccactggggccagccgcacccatcctcagcagggggctccttcaacttcgcctccttctctggccttgccgagcagctcttcagcggcgccgacgggtgcagcagcaatagcagcacaatcgacgagcacgacgacttgctcgcggcctcctcgttcggcctcgcgaccgcgcgcaaggcctcggcctcgtacccgatggcggctgaactctcggccttctcgacctcgacctcgtcggcggcctcgacagtcgtcaacgactacgagtcgtttgactctggctttggcagctcggccggcggcgacggctcgtggggcgccggttcgccctcgccgctcttcacgacctcggacctgcctgtcctcacggacgaggacgccctttcgtacggtgcaagctacgacggcagcgcatcctcggctttctacgaagatgcctttggctatccatcctgctcgtcggcctcgtcgtcatcctacgcgcctcccgctcaccaggccgtcccgtcgatcgacgaccttccagagtggtacgaccccgcctcatcctcgacgctctcgacaaagtcgtcgttcgattcgttcgtctcggcctcgtcgcctccgacaggcgagcgctgggactattacgacttcgcgaccgaccaagcgcccggttcggcccggcccgacgtcgacggcgcttggggctttgccgtgccgcggatcgtcgaagggagcgatgacgatgaaggctcgggctttgagcagtgggttgttccgaaccagctggtgagtcccagttccctttcttgtcaaggcatcacttagaccagtccgctgatgctccgcgcccctcccgcagcacctgccgtacgacaagtccattccgacgtcgtcgacctcgccctcgtcctcctcgacgaccatcacgccgacatctgctcctcccgctgcctcggccgactgcgcacgagatgcgacccgtcagctcctccgcaagcaagcctcggaccgggcgctcgcccgcatggccaacctgccctcggccgtgcacgcgagctcgccgtcgcttgtcggctggtcgcctacgccgcccgctccggctcaggcgctggtcgcgcgcaaggcaccaccccttcggcgaaaggccggcgcatcgtccctcaaggcgtccttccaagcgctcgcctttgcctcggcctcgacgccgctccagtcgacggcccatgtcgaccctccccagaagacaatccccgagcacttctacggccttcagtccgtctatccctcgagcacgagcacgagtgcaagccagcgttcgcccttctccccgccggcagcccactcgtaccccatccgctcggtcgcctcccctccggtcgcgctcgcagcaccaacgccggtcgcagcacccgccgccgtcagcgccacttgttcgcccgcttcgcccgcttcgcccgcctacccgtgcacgccgccctcgctccacccatacgcaacctcgccgcccgccgcgccgcgggcgatccgcaagctgcctcctcgggcgtcgccaaaggcaacttacgcgaccgtgtcgcccgcatcgtcgtcgtcgtcctactcgtccgcaagtgatccctcgtcccctttgagcgcccggccctcgcctgccgcctcaaccgccgcccggcagccaaagcggaccaagcccctcttcggcagcaccttcatcaactttacgatggcagacgcgtacgagctcctcagcggcgtcgcaccctcgggcaacctcaagaagccggtcggcgtgcggagcagcaagccgtcaggaggcagcaagcgcaagcgtcacgaggacgaggcggtccaggagcgcggcggcaagcggacacgctaagcgggtcaacgtctcgccacttctcggccacccgccctgcaactccatccgccggctctctcaactgccacagtaaacacacgcctacacctactgggaacgccgtcggcaggctcgacggtggtctcgccctcaccgcctctgcggcgcacacacactcagagcgtccggccccctccccctccggtctctgctcctcttctcagcctccgccttctcggaacccttcccacccccatcccgtcttctctactctcgtcctccgactcctcgccgtctctgccaggcaaccctttctcgattgggccgacacaccgctgccctcactaaacgccgtgcgggcgtccccctcccgctcttccagccctccctggcctactcccactccttcttatccagcgctctctcgtcgccatttcttcgcttcgccgcttcgtcctaccgggcccctatccccttttcgccttcgccgtctactctcttcccggccgccgcccttgggcttgtccgaactgtgtagcatcgcccccctccctcacccccttcccttggagctttttctggtccgttcatctctttacaccgccgctgccgagcgtaatctgcgacttttatgagtgctcttttgatcaattgagggcctccagaccttgaggcaggcagggtcggagggaggagtgaggggcaaaggggacagggatgcagagagagatggagtccgacgcggcgggacctgaagacaagggaggacgcgctacgatcctgcttttcaacagagcggcaggcgtgacgagtcgaacgggacactcagcctccaatctctgaagcggcgtgacaagaaggggcgcagacagcaggtcagcaaatacaggacgcagggcgagagcttttgtcgaaagaagccagaggtggtacgcacggtgaaggacgacctcaatcgtgtcattgtcgtccatgttcatgtcgcccggcgtcatgtcgtcgttgagccgctcgccgtcacacatgagcatgtcgattgagcgatgcaagcagtcaggcgtcgtgcgacaacgtcactgattgagaggtcgggcccgctcaaaaagcttacgggatcgagccctctgacggacctctcgtgcataggggagagggcaggggaaaggtcagttcccgactcctcttgcgccttggcccttacagctaaaatacacagtctccacttaccgatgcgctgcgagtaagcgttcctgagctttgagaacttggtcgaactctactcatccaccgacgaagagcgcatcagtcggctggcggttggggatggctcgcccgtgtagacaaccttcatcggcctactcgagccggaacgaggtcgagctcaccttgactttaaaatgaacctcgttgccgtcggagctggtgtctgccgtcaggcaaggcaaacggcagcaagggctgattatttagggctgaggggcgcctaatgggctggcaggaaagcaccttgaggttaattggctggtgccgccgcgagggaaggccagccagtgcgtcagcagcggagcgagagggggtagggcaagtcacggcacagccgcagacgcacctcgcccttgcaaggcttcttctcgggggcgggagaggacatgtcttcggaaggtatgggaaacgggtcgacgttgagagagagagggaagagaggagggctgaccgttcgcaagggcgcgcagcaggcaggcgagcgggaaaggggccgaagcccttcgccgggtcgctcggggtgttgccttcgcttgccactctaagacgataaagctcttgtcgtagacgaagcgagcacccgctctcagcttcccattgatgggtcgcttgaccacccgggacgtagcgtcgtcgctggagagcaggcaaagcacgcggcgaaaccatgacatcggagcctcagaacgtgtaggacttggatccaggctcgaagggggacggcacgggtgcagggtcacttgtgcgtcgggaggccggaggcagtctcctcaagttatctttttcttctctgcgaggcgtggtcgccgtcagcgcagagaacggccagcggcaaggtctagcgcaaagaagactcactcgatgcaatgacggcgaggacggcatggccgggcttgaagtcgacgtcgtagggcgtggcgtcgtcgtcgacctttcggccgttataaacgaagctgcgccgagtgcgaagcaagtcgttagcgtgggatcttctgctgacgccaaaagtagcgacttttctacaagatggtctcgctcggcttgcctgttcgggtcgaagaggagctgatcatcagcgagtgagggtgagagggcagccgagctgcacgccacgcaccgactttgcgcgagaacgccgacttgatcgagccccagtggtccgtcgtcatctacaagtcggcaatgagagcgtcaggaggcaacgagtcgcctctcacaaaaatagggtcacccagtgaccttcagcttgtagtcggtctgcttgccgtcggccgtttcgagctgcagcaagggaggagtgatcagcgattggcggcgacagcggtcgaagcgccaacacaccttgacctggacggcgggctcgtcgctctcgccgtcggcttcgatcgcccggacatcatcgtcgctgtcgtcgctttctatggtcactgatgttcgaagaaaggccgccgcccgacgtcgttagtcagtttttggtcgtcgagacgtcttgagggggggggggccaagacgcaccccgcttgcgcttgctggtagcttttcccgacttgactgacgtcgtcgtcgccttggacgaggagactgtcgtcttattgttcgagccggccgtcttcttgggcgtcacgtaatagacgatgagagtgtcgtcgtcctcgatatagtaggtgctcggcgtctcgctgtccgacacgcgctggccgtcgtagtcgaggctgagcggaacgatgtcagcgagtgatcggacaagtatcgacggagctagatgctcaccagatggtgtcgaccgtctttcctggagcgagagtagcgcaggttcagcctaccagcgagcgacgaagggggtagggcagcgtttgacagggcgcagtcgcaacgcaccaacacgccgggcgaaggcagccttgatcctgccaaagctcgtcgtgggctggagagtgggcgacacgaaagtcagcagaagtgcgtcgaagcaaggcagagtccttttgctccgacggctggtggctggagcagctggggccgggcaaggaggaagaaagggggtgggtgaccttgatccgaaagtggagcgtgcagtcgttgtctacgagctgcgagaacgaccgatagagctccagaggtcagcggaggaacctttctgtgtgagcgaacgctgaagcggcctgactttgatgttcaaggcgggctggtcggactgggacgagagtcaggagtcgccgtcagctcgccacagaaccgacccttaaatcgcaacaggccgagctggtcgagctcggacagcgtagaaggagacagagacgcacatcagacatcgagctcgtcttgtgcggtcgcttgtaaggcagggtgagaggtttgagggaagagggaggtgatggtcgagggagcgacggcgtgaagggggccgagccggccgcgtttcgacgcgcccggctcgtcgagcaccgcaagtgaaggctcaacgacaccggccctcactcctcgttttcgaatcggaggtcgcagggagcgtatgcgagccatagagtggcgcagggcgcgactgcagcagccctgcccacagggcatcagagagcgaggggaacgagacatcgtatttcgtgcgccagcagcgcagcagtctgccaagctcgacctgccgcccggtcggttaggcataagaggggaggtgatggcaaagagaggaaggggcaagggcttgcgcagtgacgcagggctgccttgcgggacggatagaggggtacaggggctggtccggcgatggcagagggaggacgagtgagcgaccggacgtgctttttcgaccagtcgggctgtacgaacctcgtgcgaccggggttcgtgacgacgatgataggaagcgttcttgacggcagcgcactgccgtgaaggacgacagcaggagattaaagggagccgccgatctctgagaaaggaaaggatcaaagacggccgatcagcgaggtggctctaggacggcatgtcgcatcgacgctggcagggggagactaacgctcgagaacgacctcgacggtgtccgaatcctccatcgagagcgagccgggcgtgtcgtcatcgcggacgacctcgccgtcgtacatgaagctggcgagacggcgaggcaggcggcaggtcagcagagctccaagatgattccgagctgcggccggtccgagacgagacgagccaggatgaggaagacgcaccggatggtgccgacagccttgcctatgggttagcgagcagcgcaagcgagaatggaggtcgcaagggaagcagcatgcggtcagcaaacagagcaagcaaggcacaagggcagagcaccgcctcggcgaatgtgccagaggaatcccaagcttaagccagatctcgcacgcaccgacacgctgcgagtaggccgacttcagcttggagaacttagtcgtcgtctggcggcgatcaggaaggaaggtgtgcgcgtcagcgagctacgcttccagctcgagcctcagggcgaagaagctcgcgcaccttgatcttgaagtgaacttcatttccgtccgagcttgcaacctggtgatggcggagaaaggaagcagagcaagagggagcgagtggacgcgattccgtcagcgcgcgcgtgccgccaggtcagtgcacctcgaagcggagcacggaccttgatgttaatgggctgatgcaggagggccgaaggcgacgcggtcagcgtcaagcatgatggcggagcaggaagtaggcctcggacgggagccgttgttgatcgtgcggcgagctgcaagctgcgaggcgagagaaggagcgagggccacccgttggagacggcaggaagcggagaggaacgtacctcgcccttggcagactcgccctcggccttgggagaaggaggagcagacatggttcaggagagacgaggaaagcgaaaagagatagagtgggcgtcggtcgtggatgatcgagggcaaggaggaggcggagaacgacggcggggcgtgggcgtgggcgggcgagggcgcgagactcaacctgcctctgcgggccagacacagcgagcctactcgagcgagccacgtacttgccaggcgtcgactatctgtcatcttgattcgctgcagacattctcaagcgagcagattggtaagaattaagcggccagctgagcacctcgtttggggggagtgatattgacctgattttttatattggtttatgttatcagccattttcaacccgccctgttagctcaatcggtagagcgtcagactcttaacacggtctgttcaaagcagcggggtttcatctgaaggctgggggttcgacccccccatggggctaatgttctctttttgccgccctcgcccccaagtactgagcatctgtctgaacgctggcgtgagacggccggctgtttgtctgtctgtctgtctgactcacaccgacttcgaggagtccctcagcagttatttgtgacacgtcatgaccgggcaggagcgaggcatggcgcaggagcgggcggtgacgagctccgctcagtacgacttcccgttgagagccgtgttccgagtatgtgtcgcaacgcaaggagttgaacagagagccgagggacgagggccacatctcctcaagccaaacatcgtggtagcaagagtagcccccacaaggtgactttgaaattagtgtataaagtttgctgagtaaccagcctttcgtcggcttcattagctcagcggtagagcgcgacactagtaatgtcgaggtcagtcgttcaaatcggctatgaagcttttgacctttttgatcgaagcccgaccttaatctttgccctttcttttgcctgcacacagatgacctactcagcgtgccctcaagttcaggggttgaagaggaacgagagtgtccgagtggtaggtgcatcgacctgtacgtgcggcctgcgtctctccgcctccacgtcctgggaccccgaccaccaccatctctcccggcccactactcttcaaatgcccatgtccgaattttcaatccaccgcgccgctcaggagggtcaacctggtctcgcccgcaagctacttggcgacaagccgcaagccatcaactcgctcgacggggtccgtcctgctcctgcccctccttctcgaccagctgctcgccgcgcagcgacctagcctcctccgccggccttcgtgttcagctctcccagctgacacgtcagccttcgtctcttttcggtattcaggacggccggacgccgctccactgggcggccagcaacacgtcgcttgagctgatggaggtcttgttgaagaacgtcccggcaccggacctcgagctcggcgacgccagcgggagcacgccgctcatcattgccggtgcgctgccatcgctgtcttcgctcacctcagctcgcaggctcactatgacccgacctgcgtccggcctcctctcagtgagctctgggattgaggccaacgtcgtcgccttgctcggctccggggcaagcccgtcgacggcgaactcgaagggccagactccgctgtacgtcgttcctcacacgctcttcgcccttgcactcgccagctgacgccgcatcgccgtgcccgatgccagacactacgccgcgtccaaggcacggatcgagatcggccggcggctgatccagaagggggccgacgtcaacgcgaaggacaaggcgagccagctgccgctgcaccgggcagcgacgacggggagcgacggctttgtgagcctgctcctggctggcggcaaggacggcaagcgtccgcggctgaacacgcaggaccggatgggtgcgtcgtcctcgtctggctgtcgaggagtgcactgcgctgggcatcccggacggccggccgacaatcctgcccgcacgcacgactgacccgataacgttcctctctctgatcatccaggcaacacgccgctgcacctggctttcgaaagtggttttggctcgacggccgttctgctcatcgaggctggtgcggatcgcgatcgcgtgcgtacctcgtcctccgctcggacactcgcgcgaagcacgccgctgacccttgcccaccctccttgactctctccagccgaacctcgacgaccagacgcccgagcagattgacggcctcggcggccaagagcagaagcgcgtgcgcgactttgtctggagccgggtcggccggcctgaatagagacgcctcctgtcccacttgcttctcgatcgtcagcggcgacggttcagcgctcgtccagctattgaggagctggcgtaagactaacactgatgtcaacctgagcgacggcggtcaggtgcgcagatggagagcgatgcgccagctgctgtggtcgacttgcccttccacatcgagcgtttttcgcgcatcgcatgcgagcggcggtcaggtaagtgagacggcgagagagaggagtcagccaagggtttggccatggaccgactctcgtggcggccgagtgacgccgtgacatgatttccgggcggcggaggcggcagtcgacgaagcgcttcagccctcgctgtccatctcgcgcctctgcattcactcgactccccatccacatcctcctcatcctctgcagctccgctctggcctgcccttcctcgctgcggacgtcaccgacaccggcggcctcttcgatcatcaattagcagccgcaactgcctcacccagtggcaccctctgccgagggctgaacgcgccttcccccctctctctccctctctgcccgcttgttggccgagctgcaccgcctctagtcggccgagatgatgcaggccataccggataacgtcggcggacacgcagtgtgagtcttgccctctcctccttctgtgggtcagctcgtctgagtgcgggcggcggcggcggttgcgagtgaaagggggaaggcgacggccggggctcgtgccttcgcccttgggtcggggagccccccctctcccctgccgtgcgagccttgcttgccggccgaccagcacccaagcaccaagttggcttctcgcccagaccatccttctcgaactcgccacctcactggtctcctcgggaggatggctgctgccgtcgcgcctcgctctggcccgcgtacgaggcagagctcgctcgctcccttcgccgacgtccgacctcgcttggcgacgccagctgctgccgctgctgagctcgccgacttggatgagcggtctaccgaccaaccggcgccatccggccaggccccagttgggaggcgggcaaggctgggcgcgctcctcaggagcttgcgacctcgggcgtcggccacgttccggagaccgacgactgatcccgttgccgaccctccttcctcctcctccatctcgctcggctcgtccatcaccgactcggatgtgcttccatgcccgccgccgccgtcttcaccgctcgtcccgccgccgaccaccccggctccctcgcctcacgtcctcgcctatcggccttccgggccgtcctcgcgacctgaccgcgcggcccgaccggcaaccgcaccttcgtctatcgtccgtgctgccgtgcctggtcccgtctctgatcgtggcacgctcgactcctcggacccgacaccgctcatgaccgatgtcgctgcgtctatttgtctcgccaacccgatgacggtcgccgaccctccgtccctggcgactgcacgctctgcgatcgcgcccgatgccgctagcttcgcgcccccggcgccgctcgcaaccccaccaccagacccagagctgtctcagtcttgtcggtcgggcggcgcacaaccgcctgagccgcggcacgccgagcgggcgcactcgattagccgagagcgccgtgaccgaccgacgtcgtcgcctccgccgtcatctgccgtgccggctttcagagtcgagccagtcgagattcatcctgtcacggacgggccatcgaacccgccggctcggagctcgtcggtccggcgagcgcacgctccagaagggcagatggacggccaggtcgcaggtccttcggcggcggcctcgtcctcgcgcgcccatcacagctcgtcatcgaaacgccagcagcgggtcatcggcgacttctttcttggcaagacactcggtgcaggctcgatgggcaaggtcaagctcggctcgcacaccaagacgggcgcaaaggtcgcgatcaagattatcccgcgggtgccgcccgacgcgcaccggcacctggccgagcaggcgcacgccaaccatgcccgccagccttaccggtccgacggctcgccggcgacaccgccgccgccgctgccgaccgactcatttgtcgccaaggcgatcgccaaggaggagagcaaggaggttcggacgatccgcgaggcggccatcatgacgctcctccaccacccgcacatctgcggcatgcaggagatggtcgttcacacgaaccactactacatgatgttcgagctcgtctcgggcggccagatgctcgattacatcatcagccacggccggctccgcgagcgggcggcccgcaagtttgcccgccagattggcagcgcgctcgagtactgccaccgcaactcgatcgtccaccgaggtaagtgtaggctgtcgccaggtcgtctggctacgggatgctgacaggccggacccttgcctccggaaagacctcaagattgaaaatatcctcatttcctcgaccggcaacatcaaaatcatcgactttggtctatccaacctcttttcgccctttacgcagctctcgaccttctgcggctcgctctactttgccgcgcccgagctcctcaacgccaaggtctacaccgggcccgaggtcgacgtatggagctttggtatcgtcctctacgtcctcgtgtgcggcaaggtgccctttgacgaccagagcatgccggccctccacgcaaagatcaagcgcggcatggtcgaatacccgccctggcttagcctcggtcagtcaccgtcgtcgtcatcaagaagagctgtgagctgcagctgacgcccctgtcacctccttcattagagtgcaagcagatcctccagcggatgctggtcaccaacccggcataccgggcgccgctgtccgaagtcatgtcgcacccgtggatgacgaaaggctttgacggcccaccagaggcccacctcgtcccgcgcgagccgctccgggcggacgagctcgactggcgcgtcatcgagggcatgactggcttcgagtttggctcagccgacgacatcgagctgcgcctccgcgacgtgctcgagggcgactcgtaccgggcggcgctgacagcgtgggagcagcgcaaggctggcatcaggggcggacccggcggctggaagaaccacccccaggtcgagagcagcgcgagtctcgccggcttggaccgggcaatgtcgcacgacggcggctcgcaggcaggcctcgtctcgccgagctcgctctccaagcgctcgaagcgcgccagcggcttcgacttcttcaaaaagaagctgttttcgtcgtcttcggccaaggaggataaggccggggcgtcggcgacggccggctcgaacggcaacagcgcgcatgtcaacggcatcaccggcatcggcgctcagccgtttggtgaggcggtccaggaccccctcgacccgactcgcggcttccatccactcatctcgatctactacctcgtccgcgagaagatggagcgcgagcgcgtctatggccccggccactttgcctcgtccgacatgtcgcttccgatgagtgccgatcttttagctcagcagcagcagcaacagcaacagcaacagcaccactctgccaacggtgtcgccgcggtgccggtccccatcgcgggagctcccgccctcccgcccaagagtgcagccgcccccccacccccttatgcgcctcccgactggcttggcgtctcgctctggatgcggcaaggggccatgtaaatcgctgaaagcgcctaaggccgcatcttgctgtggttctcgacaatgagccgcttgtaggccgagacgtcgccgtaaaacttttggacgctgccctcgttgcagacccagagctctttggcgaccgtcgtgatgaagcgcgtgtcgtgcgagatgaggatgacgccgccgttccaagtcttgatggccgccatcagggcgtcgatgccctcaatgtcgaggtggttcgacggctcgtcgagcaggataatatgcggcttctgcatgctcaggacggcgaaggcgacgcgcgacttctggcctccggagagcgttccaatcttctggagacccgtcaggccggtgatgccaaacgcgccgaggtgggcgcggtactcctgctcgccctggccggggaatttgctgttgaggaaggcgacgggcgagagcgttaggtcgagcgagtcgacgtgatgctgggcgaagaaggcgatccgaagccggccgttgcgaacggcgttgcccgagagggggtcgagatcgccgacgagcagcttgatcagcgtcgacttgcccgcgccgttcgggccgataacggcgatccgcgagtcgagcgagacgtcgatgttgacgtccttgagaatcatcttctccttcgtgtagccgaatgtcacctcgctcagctggagcaagggcggtgagatcttttccgtctcgggaaacttgaagctctccgagtcctccttctctggcggttcgagctcgggcagcttttcgagaatcttgatcttggactgggcctgggccgcccggttggcattgtagcgccagcggtcgataaacgcctggaggtgctgccggtaggcgagctgcgtctcgtactccttcttctgcgtcagcagccggtccgtcttggtcgcgtagaactgggtgaagttgcccttaaagtagtcgagccgctcagagtgctgccagatgatgtcggtcgcaacagcgtcgaggaacgaccggtcgtgcgagacgacgacgagcgtcgacggccacgtctggaggtagtcctcaagccaggcaatcgcgttgaggtcgagcatgtttgacggctcgtcgagcatgagcaggtcgggtttgacaaacagcgcccgcgccagggcgagacgcatcctgccggccgagcgagagacgaatctggtcagccgatgcgagcagaaaacctgcagagcgacagaccgcaccgccaaccaccggagaaggcccgcgttggcttcgcctggtcctcgacttcgaagccgagaccgacgagcagctgcgccgcccgggccgggcctgactcggcctcgatgtcgatcaacttcttctggatctcgccgagcttcgtcgtcatctcgtccttctccgattcgggcacgtcggccgagttgagctggtcgttgagctcgcgctcctgcgtgagcaggtggtgccgccagacgtcggcctggaggaccgactggatcgctgtcgtatcgtcgccgacaatctcctgctcgacgtagctgtgggggggcaagatatatgtgagcaacgtgacgcgagaatagaagactgagcgaaagcaagcgcacaggacggaaatgtgcgagggaatgggcacctcgcggagggccatgttgcggagcagcgtcgactttccgataccgttccgaccaatgacaccgtaccgccggccgtgggcgagcgtgagggcggcgttagaaaggatgcggagcgagccaaaggtgacgtcgatgttggcgaggtggatgtccttggacttgccctttgcgctcgacatgtcgagcgggttgacctggaggcagacggccgggtcagcaagcaagtctagagcagggctgcacatgaattcgaaggctgaccttcatgaacatctcctcgtaagactcctgatgaagggcgaggagaagagcaaggctggtcgtcagcaaatggaggtgacagccgagctcgtcgagctcaggtccggacaaaccttcttggcctggatatccatcagcttggagccctcgtacaggtccttgcggttccgcttctcgagcttggccttgatcttggcctcggccttctcgagcttcttgaggtcgactcggctcgcctatgcgcagaggtgggaggacgagcgtcagtccccgaagctcgccagctccggaccagcatctcggatcagacgcacgttggccttgccgtggtgctcgaggtcgacctgaccgttgaggccgatcgcagcagcaagggccgtgccctccttgcgcatgtcgacgacgtggtcgagctgccgcagggcttgcgtcttcttgggcgcctgccgggtcgtcgacgccgcgaggaacgcgctcaggcggttgatcctgcgcacatggccaggggcagttgtagcggtcagtcggcgagccgcgaaagggtctcaagagcagggagaggacggacaaggcctcgaggtcggccagcttgtcgtcgccgtccgggccgccctggagcatgccccggctcatctcgatgatctcgccctcgtcctcctcctcgtcctcgagcaggccaacgatatagctgacaaccgtctcatccgtgtagggcagcgtcttgcgctgtaggcgtcaggaggtcgaaagcagcgtcagcagctggctagcgccgtcggaggggaagcgaggcagggtggtggcgccggcggcggccgcccctcgtccgacccgacaagcagagcgagagaggtcgcacaatgtcctgagctagttcggccatcctgtttgcagcttcccgatcggcggcgaaagtagaggagagacgaggtgagtcgggaggttcagagttggtgaaggtcgaagggaggagtaggtctgcccgcggtcgactggcgaagtgaagcaggcaggcagcagccactgtcggcagcggtcgtcttccttttgcatcaggcagatcgtcgacgtgcaagacatcaaagagagggggaggcaaggaactttcgcacagatgtctaggaggaagaagaaagaatgagtccatggaaggggggttgcgtgagagcggagggggaggagggctgcgacgacgaatggatttgaaaccgtccgccgtacgctgaggtcgtcaagcgaacgaggtgggagaacagggcaggcgagagcgcgcatgagagctagagtcggcgccggtcgagcgggtggcttccctcgtcctcctcgaggattgtgtcctctggttcgacgctcgcgcgcatgcttcggccgccgctgccggtgttgacgggcgtcagctgcgggcttgacggccgcgagttggccggcgtcgggtagccagaggtctcggctccgttgccgccgaggaagtggaatcgcaggcggtgaagctggaggcgagatgaggggttgaagttagttggcgcgcgacgagggcgtaacagactgttcgcgcacgtaccgcaggcagcttgggaatgaggacacaggtgagggcaaacgtgttgatcgagaagagcaccgggtcgtacttggtgtagtgggtcgagatcaggaagctaggtgcgcggcgaagaagcgtcagcgtcacgaggagcgagtcgacgggagagcggcgagggagactgacaggccgatcggcacgctcgtcagccacttctttgccggcgtatactgcgctccgttgtcgatctgctcccagagcgtgagctcgtcgtacgctccgccggtcgccatcctgttgggtcgtcgtcgcatggcggtcgtcagcaaagtgcaagatctcaggcagtgggagggtatacaacgcacgtgttctcgaacggcaggccagtcatctggtgaaagatgaggtacgagacctgaagaacaggaacggtgtgatggtcagacctggcctacgcggtcgacgctgctgccggctgacgaggttcaacgtctcgaggaccaaaggacgcaccgccatgtagccgcaggtgacaagcgtccagctgaggtccgagtcgacgcccgggatcgagtcaaagacaaacttgccgatgaggatcaagattgggtggatggcccaggcgcctgcagccggacgaaagggggattgacggaaaggaaggggcaggagcggagccaagcgcgtcagcaagcgtgcaaagggaaagctctgacaagctactgtcgcaagatgcaacggacggctgacgcacccttcgagtcgagccagtcccagttttgggtgccgagcgtgcccatgtcggccccgtccatctcctcgccgccaacctgcgtgaccgtcacgagactcgcgctcctcccccggcccttcaccttcttcttgtcgccggcagcgtcggccgcgctcgccgcttccgtcacgacggggacgacggtcgcgctcagcgaaggcgggccgacggcgtcgcggaagttgaggtgtgacgagtggcgtgatagttgaggcggaagaccaacggccgagcggcccgacgggcgcatgggttgcgaagaggagcgagagcgcgtcgtcgatgtcgttgccgtcgctgttgagctaccagaggacggcgtcgtgctgtatgttgagctcataccgccggcgccgccgccgctcgagccaggcgatccaccgccgctgcccggccggaagttggcaaacgaggacgaggtcggtgccgagccatacggcgagtccagcccgcccgcgccaggcgtcgtcggcgaccggacgactatgtcgggcggcggaggcggcgacggcgactttcgaaacttgtgcgggagaaggttgagcttgaaggacgagctcggcgagccgggcgagagcgaggccgaaggcatcgagctgtgggtggcgggcgtgtaaggttggtggaggcaaaagccggtgcttggtcgacgatgcggtccgagggatgttgtgagagaccggtggatgcgaaggacggtgcagctcacgtgggccgagagggctgagccggagaggagcttgcggccctgggagagaggctagtggctctagaagggacggcggctgtagttctggaggggccgagggaattggttcgcgagtctccgctgcagcgagactgaggtatcggcagggatctgagggcgtgtcaggtaggcggatgggtgatgggcgttgggctggcaggcaggcaggacgatgaagcgaggccggcgtctttgcgcgggcgcgcgacgccgcacaggtgccagcgaggtgcagcagcgccggccgctgtataatgacaagccggcgcagcagaccgactcgaaatcgtgtgtcccgttgacgagcgtgcgcatcccgtctttgagcggagggccaggatggagagcggcggtcaagaaagtgggatgtgcatatacaacagcgcgttcgagcgagggtccctttctcccgcaccctttctgcccgagtcgctaaagcttcatccccgcactcccgcccgtctcgctcttgccgtgcgtcttgaacttccgtcccgcccggtcggccgacctgaagcgaaagcgtgagccgaagaggtcgagctcgagctttccggccggttcgctcttcgacgattcgagttgcgagccggccagcggcgtcgtcgctgacgatgatggcaacaggggcggaggcggagcggcaggccggacagataggagcgatgagatggaggcgtcggggctcgtgggccgctgggcgtggaacgacggtgggagggcggcgagcgggagggccaagcggaagacggtctggtccttcggaacgactgtcgatcgagggcgacgggcacctgttagcgagcaggtcgggtatccagcgtccctcttcgctggcttccgagacagtcgacctctggcgaaggagggagcgcatggttgcacgcacctcgaactgcatcgcgctcagtcacgaacttaaacgtattggccgtctcgtggatgacgatcccagagaggccgacaagatcggcttttggcgccgacttgactgcagggcgcacaagaagggaggaagtcaactccaacccgggagacatagcgcaagaaggggatagacgtacccgtcagcgtcgcgccgacaaactctgcctttgcaagcttgccgagcaggccctcgacgtttccctcaacgaggttcgcgccattcagcctgagcccggcaagaccgctcgcactcgccagcccgaggagctccctcgcgtagccctcccagaggtcggcgagcccgcgcagccgaacgtacgacacctcgcctcgccccggcgcccagacagccttccgcttcgcctcttttcgcgagagcaagccgacaacgccgccccggaccttatcggcctgccggcgggccttcgcctttgctttggtagtcgcatgggcggacggcctcggcgggttcgagagtgggacgagcttcttggacagcttggaagcgtagatagccggtggaagatcgtaaacgagcgcagggagcgtgtcgatcgtcgtcggctcgtagggcgtcagcgacgagaaggccagacgggtcggctgcgaccattcagggacggacgtcgtcaggcatcagtcagggaaggctgaaggtcggagcgcgacagagggacggacgcggagcgagtttggcagctcgcgctcgaggtcgactgccgctgcggccgctggctggaggcgcgaagacgatgcccgggcattctgccgggtcggcttggctgtgctgctgctgctgatgctattgccggcgctcatcctgcctgtcggtcgtcgtcgtcgccgtcgtcgtcaggggcaagcaagaggcggctcgtcccaaacgactggcccgtcggcttacatcaccggtgaacctgcctggtctgcatcgagcagcccgcccggcgcggagaggaggccacgccagcggccgccgcaccgtccatcggcagcgccgactcatcgccgacacccaccaacccacccgcccttccccgatcctatcttctagatcacgccagcctccatgtacaggctgccctcgctcctcccgcgaaggccgataggtcctcgctcggccctcttccgcctccctgccacctcgcgcgccatcgtcgttggccggccgttcgcgagcgcgacgcctccaccgccatcggagtctggcaagccgacgataccgtcgtctgaggccgagcggtcagaggtcgcctctgcgactgctgctgatgaggccaaggctgcgctccagaagggcgctgctgccgacaagaagaagtcgccggccgagccagaggagggcgacaaggacgcctcctccaccgcatcggacgccgcagccgacgacaagccgttctcgctcgagggcttctttggcaacccggccaaggccgactcgggcaagtcggccgctgccgaggacggcgaggaggcaagctcatcgaccgacaagaaggccggtggcgacaagctcggcagcaagaagaagaaggcggccgacgacttcaagaatggcttcttctcgggcggcgccggtgcaaacgggacgcctggcgcgccgagcaaccggtcactcttcctctggggtgtcgggtaagtcgtctcgagcttcgaagatcgcctgggatgtggtggcggcgatgatcgatggccgcaccggcgctcgcgcgcagaggttggaaccgctcggctgaccactcgcctcttccagatcggtcatggcttacacgtacctcactggcgacaactcgccgtccaaggagattacctaccaggagttgtgcgtcttccctttgctttgtcgctccatcggtggccgtcgaggctgacgcctccctactctcgccccagccgcaactcgctcctctccaagggcctcgtccagaagctgacggtcgtcaaccactcgcgcgtcgttatcacgctccactcggccgccgcctcgcccgtcgccgcgcctgcctcagtctgggacgccggcgcgatgacgccctcgggctcgaacggcggctcgtcgctccctgcgccgccttccacgggcggctcggcgaatcagacgccctactactttacgattggctcgcccgaggcttttgagcgttcgctcgaggccgaccaggacgcgctcggtgtcccgctttcccagcgtgtgcccgtccagtataagagcgcgagctcgtggtgggagtggggactctcgcttgcgccgaccgcgcttctcgtcggtgtcatcgtctggagcacgcgcaaggccatgccgggcggtgctggcggcggcggtggaccgggcggtatctttggcgtcggcaagagcaaagccaagatgttcaagtgcgtcatcttccccttgcacctgttgacgctcacattgctgacttctgaccgcttcgcctgccagccacgagaccgacattgccgtcaagttcaaggacgtcgccggtatggacgaggccaaggtcgagattatggagtttgtcaagttcctcaagcacccggccaagttcctcgcgctcggtgccaagatcccccggggcgcgatcctctcgggcccgcccggtaccggaaagacgctcatcgcaaaggcgaccgcgggcgaggccggcgtgcccttcttctcggtctcgggctccgagtttgtcgagatgtttgtcggcgtcggctcgtcgcgcgtccgggacctgttcgccaacgcaaagaaaaatgcgccctcgatcgtcttcatcgacgagattgatgcaatcggcaaggctcgaggcaagggcggatcgttcggcggcaacgacgagcgcgagtcgacgctcaaccagctgctcgtcgagatggacggcttcggcggcaacgagcacgtcgttgtccttgccggcaccaaccgggccgacgtcctcgacagcgcgctaatgcggccaggccggttcgaccggcacattgcgatcgaccgacccgacatcagcggccgaaagcagatcttccacgttcacctccggccgctcgtccttcacaaggacctcgcgtccgagtacatcgccgacaagctttcgatcctcacgccgggcttctccggcgccgacatcgctaacgtttgcaacgaggccgcccttcattgcgcgcggcgcgacggcaaggcgatcgaggagaaggactttgagagcgcgatcgagcgcgtcattgtcggccttgagcgcaagagccgggtgctcggcaaggaggagaaacggacggtcgcctaccacgaggccggccacgccgtctgcggttggttcctcgagcacgccgacccgctcctcaaagtttcgatcatcccgcgcggcgtcggcgccctcggttacgcccaggtgcgtcatcccttctcctgcgctgactactcgtccgccggctgacggcctcctcttcctcgctcttcgcctcttgcagtacctgccgaaggagcgcttcctttactcaaccgagcagctgctcgactcgatgtgcatgacgctcggcggccgcgtctcggaggaaatcttttttggccgcatcacgaccggcgcgtcggacgacctccagaaggtgaccaagatggcctgggagatctgctcgacgtacggcatgaacgacgccatcggccccgtcagctacggccggcgcgactcggagcagttccagaagcccttcagcgagaagacgggccagatgctcgacgacgaggtgcgtcactcgtctctattcatcccgtgctgtcggctgacctgtgctttcttcggccctcgcttccttaggttcgcaagatgatccagggcgcgcgcgagcggactcgcaagctgctcgagtccaagcgcgagcaggttgagctcgtcgcccagcagctgctcgaaaaggagatcctgacccggtgcgtctgcgcctttctgcgtcgcgttcctttgcccgcctgaccatccgttcttcgtgcctttagcgagtcgatggtcgccctcctcggccgccggccgttcgacacccgggacgagatggacgacctgctcgataagcgtgcgcaggacggcgagcagccgaacctgcctttgccggacgagaacacgcctgccgggcgagactcgacgccgggaatcccgagcctcgagcccgggtcgctgccgtcgatgtagagcgatcactgttcggttccatccgccgccctcctgccggatctgtcttggactcttcacgtacagcaagtgctcgcaccgagcagccatttttgatcttgctaggcgggcccgccctttgtcgttgaaatcctcctttgatcgttagacggcccttcctcccgcacaccccgacctgtcggacccgcctgcatatctcctctcgcagcaggcgtccgacttcttttccccttgtcactccctcccgcacacactctgtatcaatgcaagcaacacgatactgagctgagatagggtagcggtggcagatggtcaggcagccaatcgctcggctgcgcgagaggccgcagacctccgggcatcaagagcagccccgcagtctcaagaatccccctctgcccccctcctcatgctctgtgcaaggtcatgcctacaactgcccttttgactgtaacagatgcgccccgtacgccctcaggcatccctctctcctggaccctttttccttccctttccccaggaaggtcgcgcctctacgtgtccttcttgatgcgctcggcctcgcgcgcagccttctcgtcgagctggcgctgctcgcgctcctcggtccggcgggcgtactcctggccagcctgcatgccgataacgccgagcaggcactgccgagcggaaagtacgagcgagaaggggaagccctagatcagtaatcggagacgtcggcacctcatgcgtcggggaagcgaggtcggaacgcacgatgccgatgagcgtgttgccggcggcaagcacgcggaccgcgtccgtcttctcgagcagcgtgtagggcacatcgggcggcggggtcgccgggaggagcgtccacgagcccttggtcacctcggtcatcgccagcgggactgaaaggtgcggtgggcgggaaagggcgaggaaacagtcagcggtcgatgaccgcgcatcgacgtctgaggtcgctggaggcagacgcacggaaggtccggaaggccgggatgtgaacggagaggtagaggacgacagtgacgacctgaagcgctgcaaatcgcggagaggagaagaggggtcagctgagggctcgacacggacggcaggagatttcaatcagccgcccgcttgctcgcaacgggcggagccaatctccccgagcatcatggccgatgcttcgcaacagcgtcctcgacatctcatgaggctgagcgtcgtataggtcacactgttgctaggctcgcgccaagtctacgacccggaaggaacggagcgacgcaccgagcgacgagccgtcaaagaagatggcgctctcggtccacgagttgagcttgagcgaaagcgcgacgatcggcgcggccgcggccgcgtgcaggagggccttgacgccgacgggcgagttccaccaggtcgtgtagtaggcaaaggccttggagatggcagcctcgtcgagctggccaaagagcaggtcccagtcgacctgcgacgggagggaagcgcacgaggaaaggttcagcccggctgatggacacgaggcaggcggcagggacgcacaatctggttgacgaggacgacgccgagcaggaaagacgacgtcacgtagacgaccgaggacaggaagccgggcatggctgagaagagaagaagaagaaggagcaaggtaaggtggttgaggtcgggaggacgaggagagtgcagccttggctcgcggtctcggcccaggcaggcccagaaaatgcattgaccctctactcgcgcatgccggcccctttctggctcaggcgagctctggacaccctgtcgcacccctacaccacctcgtctcgagcgccggacatggtttgtgaacgcatcgcaagctagctcactgtacacacttctgaccgcttgtctctgctcactcgcagtccgacggcgcggtaacgacgcccttcccatcgcggccccggctgcactcggcctcgccgactcgaagcacgcccgacgagcagacgccgcgcgagctccggactctcgaagccgcctggcgctcgctccgcccccggtcgagccctctcctaacggctgatctcgctcaggcgttggggaccgaggagctttcgacaaaggctgctggttggctcgatgcgccgaggtcggcggctccgtcaacacgcccaacggcgacaacgcgcctggccagcagcagcggcaaggagaacgagtccgcccagccgacgtctcacctggccaaggtcgtcgacgggaggagcaagtcgcgtcgccagctgccggatccttccccgcggccgctcgccagtggcggaagccggtcaagctggtcgaccgacatcccgctcgcgcagcagcagcagcaaatgcgtctgtatccgtcaacccgcctgccatccgcctccagggacggtctttcgagttacggacaaggtcccagcgccgagctcgctggccgatcggcctcgcacgcctcgtctgctgggacgcacaaggcagtgggcagccctccggaaccgactgcgacgcgtcatcagcacaattcgcgtcgcgccgtcggccacatcgctcaagctacagacaatcctgatgtcaggaagagccggacggcatcctatgaccggtactcatgggagacgggtgcgagcgctggatcattggtcgcgcaaccgacccctcggaaacagcctcgcgatagcatcgctctccgtccggctcgacgcgcgcccagccgccggcccctcgagcatcagcatcatccgggcaaggttgctgccgccgatcggatcgtctcgaccggcagctcgaccgcgcctctgttcgcaacgcacgagtcagcatccgcccgaccaaacgcgttccatcaaccggccttgggcgagcagtcaagcaggaccgtccacgagagacggccttcgccacatgtagcgtttgtagaacctgacaacgttcagcttcgtcacgctcgacgagggcagccgccgagagcaacaacagcactcaggcatccagccgaacaccctctcgcgacgctacaccttccgccggccgctcagccgctcaagcacggccacatcgcgcttctcggcaggttgtcagtccgatcagctggcggggtccagggctcgggcgtcgttctctggctgagaggcgacatgtgggcgcttagcgctgacggaggcaaggtgcgctcgtcttgcctttcctcatcttcaccccgctgacacgtgtctggttgacgcccgccgtgcagctcgcccactggctctccgtaccacgcatgttttcacgtgtgatccccaatcggaaaccctcggcgagctggcgactgcctccggacctggacaaagcaggcagcatcgtaaacggtgcaggggggaagcacggtcggcggcttcgcttcatcgctagttggatcaccgctgagcgcgcgagggccatcaccgtacgtccagcttctacagcccgcggagcagtcatcctcgaaactgaatttgatgcgagcaggcgacgatcaatctccctgcgccgatctacccggcagggacgaccctcctcgtccattccgacggaccatcgccctcgctcactctgcgtttgacctgctcgtcgctggcctcggcaaaaacgacggtgacggcacggtgggcatcctctagcccagaaagcgtgacgattgagagccgctcggccgcgctctggacgaggcgcgtcgtccagcggtcctcaggagcccatatggccgacgacggcgacaatcaggcggcagtggggacgatggccgaatctacgaccgccgaggagcgcatggcgtggggtctgctcgagcgctgtctgcgggagcgggtcggcgagggcgtctggcgggcgatcgtccgtggcgggcaaggtgacgatgacacgggctgaagagagactgtctgcaagacgatgtgatctgtttgaacaggaacacgctcgacctcagcatgctagcagactgaaaaacgacggccaggcttcagaggtgtagaagtgctgcgcgacaagtgcggccggacgaggcgcgtcggagggaggacgatctcattcaacccgacctcgcaacgtcgaccttcgctaggatgagcagcccgaccttcttcacccgtgcttcgccgctgtacgtcccttctgaccgctcgcgtcgctaccttgaactgacccctcgctcgcatctcccagcccggcgctctactactacctgctgggcgtcgccgagccggcataccacctcgccctcgccctctatgcgatcctcgcccccgtccggctctacgacaactacctcgactttcgctgggtcgttaagctcggcgagcacggcggcggccttcgtggcagctgggccgtcaccaacgtcggcatccgttggtcccccttggtgctctgcaccccgagctcacgccggctccgaaggctaacggctgctcctcctcccggcccgcccgtctcttagacaccctggcatctgcgctcctgagcgcctttatgctgccgacgctccagaccaacctgcgcaactatccacagatccacgagaacctgctgctcaccttcttcctctgcctctcgctgctcgacgtgcgtttaccatcctggcatcgcctccgccgccacctggactcatcgactgacaactcagccgccgttgctctcaaggtcttcgccatcttcttcaccttctcgcccctgccggcgacgattgtcggcaacccggccaagtggacgtggaccttcatctttgttctccttccgcgctttgccggcctcgccgtccgctcggcctggttcattggcgccggccggccgacgtacggcatgggcgacggcgaccgcaagaagccccagccgtacttcaagacgccgaccgaggagtcggctcgccggctgatggactgaaggtgccgtcgctgggccgcacgagggcagcaggcatgccgtccagccaacgtcgccttgaacgaagtggctcgcatctcactcaatcacagagcagaaccgtagaggatcgggctcgcatcatgttcatgtcatttcctgtcgagtccgatgttcgaagagtgcgctgtcgaaaggtgttgcaaggctgagttgagcgcctccgtttcagcctgctcctcgaactccgaccagctcctgcctcacccagcccgtcatccctcaacgccgccagaggagctttccttgcatcagtcatagccttaatttgctctctggacgggcacctgctcaacttcgcgtcaaaccccctcgcgcaagacacctctcgtctccgctcctgtcgcccgcgtccgagttcaccgcaacctgcgcccaaactggctctcaacctcaccaggccgtcgtccgtcggtcgccaggtccagcacggggtcatcagcctacctgtacacgctcgtagaatcctgaacttccagcgcaacatgtctgccagcggtccttcgagtgacggcgtttcgggtcagaccggcgctcagcccagcaagtacgtcctcgacaggcattgggccgctacgagtacctctagaccgagctgaccgagctcctaaccaagcaccatcagcagcgcatcgccgcatctccagctcccggtcgagttcatgcgtttcctgtcggacaacgagctctcggctgctttctacgagccgctgctctcgctctcgcacgtaccctcgcgcttcgtccacccggtgtcgcgaccgcttggagaaggcccgcctgtcgcccgtgcgaccaaggaggacatgacgcgcgagctcggcatcccgctcgacgagatccacaacgtcgactggctgccggcgcccgaccttgagttttggcgcgtaccaggccactaccgcgtgcactcgccgtcgttcaagtcgggcgcctttcaggcccttgacgccggctcgggcgttgcggttcatgcgctcgggattgagccagacgacaacgtcctcgatctctgctttgcaccgggcggcaagggcgccctctgcggcgaggcgacccgcaccggccgagggaccatcactgccgtcgacgagagcgaatcgcggctcgccatcgccatggcccgctcgcgtcggacgggcaacttcgccaaaacgcgctatcaccgggctgacggcacgacgtttgacgtcggcgcgcctcgggtgaacgttcactggagggccaagagttgcgggacgacggtcgaggccgagcaggcgagggacgccgcgctcgacgcccaatgggcgggctgggagcgagatccgatccgtccaggtgcagagggcgctctgaagggcaagtggcacaccacaaagcgcctgcagccgatgcaggccgacgacgtctttcagccatatgacaaggtcctcgttgacgccgagtgcacacatgacggtacgcgcctcatgaagcctctgcagctcccctttcgacagtcacgctgatcagcgtgccgctctaccctaccacaggctcggtctcgcacatcctgaagtacatccggccgatgtcctttacgtcttttcggccgacctcgccggagctcgatgccatcgcacgcccctcatcgcctccgccaccgttgccgcggttgccgcgggcactcgccttcccgcaggccttcctcgactcgctcgccgaggcgcggacgatcctgccagagctccagctcggcctgctccggaacgggttccgcctgctcaagccgggcggcaccctcgtctacgcgacgtgctcccgcgccgtcaaccagggcgaaaggctcgtcgagcggttcctcgccgagatcaacggcgacaacggcgagcgctgcctcgtcgaggacgtccctggccgagaacgcatgccttgcgccccacgtgacgaacgttacctcgacggcaagggcctgcgcttctcgggcgagtaccgacccgggcgcgaggacgagtgggtcagcgccttgttcgtctgccgcctgcgcaagattagatgaggtccctctttatcagtggccggtaagccagtcgttgattcgagcgctctgtgaaaagtgcatggaatgggtcgcatccggctctactcctcccactcgacggcgacgaactcctccgcccacgggccgccgcagccagcctcacagctaaacatgtcgacgacgccccactccatgcccgtctgctcgtcggctttccgctgggccgacaggaggcgctcgacctcacgccggcgggcctcgtcgctgtcggcgccggcgccagttgtcggagccgccgtcgagccgccggctgccgcaatctcatcggcccggaggaggttgagcaggcctgggacaagctgcatctcaaacgcgcgagggcccttgcaccggctgcagggcgggacacgcgctctatcgtagacgccccgcttggcagcagctgctgacgcggcgccggcctttgagctaaagagcgtcgagtggacgtttgacgtcgatgagtaagccagcggctggccgccaaaatcgtatctgcagccgagcaagccgagactgtcagcgtcgccgaccgcggaccgcatgtcaaagggacggatgcgcaccggacaacctgggtcggctcgtcctgcagccggtcgatgaagcgctcgaacacctcgtccgcgcccgggatcccgctccccttgacgtactcctggtcgaactcctcaagcgccttgcgctttgcggcgtcgtccatgccggccacctcggcgaggtgcgcgtcctgcgccgccttctgcttcttgctcagttttggccgcgaaagaaactcggtctgggtcgagaggtactgggccgggtacgaggacacggtcgaccaggctgtacgcgtgtcagaagatgggcatcagcagtgcagcgcggtcagccctgcaaagacgagtgtacgaaccagggtcaggcgttggcctcgggccgtcctcggcatcgtcgtcgtcgctgtcggcgtcatcgtccgctgccggctccttgtccagtgcgaggtcgcccgtctgcttggcgaggttgtcgacggccgtgtctgtcgtcgtggcggaggcagcaggcgctgcaggagcaaaggggttggtcgaggcaaagggattggccgacgcagccggagcaggcgctgcgaacgggttgaagggtgccgacgaagaaggagcagcagcgctcgctgcgaatgggttgaatccggcggcaggcgtggactggctcgagctggcggcagcagtagcagcggcttgagccttggcggccttctttgcggccctccgctcgtgagccgacgcaaagcggtcgtttcggacgatcgaagagaacgctcgcaggctgtccagacggaaagggggttttggaaacaaggcatcgcattgatgagtacagaacagaagcgagagaaagacgagaccgtgcggggaggacgcacctccccttcttgctgccgccggcctcgccctggcagccagcgcgggcgcagccaaaaacgtaaacgacccggtcgtcgacgctgccctcgagcggcgcgtacagctggagaagcagctcggtcggccgggcacacgtcgggcaggccgttgccgtcgccgggtctggaaaggccggcagcgtctggaggaacgctggcgggcctccgagccgcgagacgcaagcgtcggcgaggtcagccgcacacgcgatcgagccgtcgggcaggccaagcatgaccgaggtcgagaaggaggaggcgaccgagccggccgaagagtcggaccagtcagactcgtcgtcgacagacatggctatggaaagggaaagaggaggaggaactgaagcgattcggtaaaagaaggagtcagctttgaactctccttggcaggcaagaggagagaaagcaggcggaggcggggagggttcaggaaacgctagccatagcaaaaagataatcgtctcattcccatcgcccggtctactgccgcccgagcgccaagatgcccgtccttcaaaacgaaggccgggcatcttggcgctcgggcggcagtagaccgggcgatgggaatgagacgattatctttttgctatggctagcgtctctccttccccttagcctggactgacgccccttcttcttctccgctctcggcctcacctcgcccctcccgttttcctggacgtaatgcagccctccaacctgctcgaaaagccgacccggccgcacccgggcaacgtcgagaatcgcaaagtctctgaccgagccgaagcctttatcaagcggtccgtcccctccctgccctccccttgcctcccctctactcgactgatcgaagggctgacaagcggtcctgtttggtttcggttgtggacgcggacgccataggggcaaagcggaagagtcgctttggtcgcaagcggtcaaggcggcaaacgccctccaaacgacgacgtgtgccgcgctcgcggcgaagaaggacgcggcggccgagactccgtcgcttgacgagcttctgccggcgggcgaggaggaggagggtgagggcgaggctggggagaaggagcttgggaagctactgaggaaggtgcttggtgtggaggcggccgaggcggtcgacgtcgacgagctcgagtttcacgttagtcccgcccttcttcttccacttggttaaagaacgaccccccttgctgatcattttccgagcgcgcaacgcagatcgacacaatccaccaagtgacgcagacggccgtccagctttcggccgagtcgaccacgctcctcgacggcctcttccacaccctcacctcggccctccgctcgcgtgccgcgttcgcccacgggcccttagcggccaacccggcgtcgtcggctggagcaagcgcggccgctgcagtggcgcttgccgctgcaagcggcgtaggataccttgtcgtccctccctccgagcgcgagtcgacgcgcggccgaagcgcgaccgtcgacggtggcgagggcgaagcgcggcgggtgctccgccggctcgcagagcaggaaggcgcaaagccaacgctctctgtccgagcggctttcgcagagctcgtcgcgctcgggccgccgacgctcctccctgcaccaacgacctcggccgcaggcggcggcggcgtttcagcgggcgcgcaacagcagcagcatggagcgagccgctcgtcgacgcctccgctcgcctcgacaacgacgccagcggcgaagggaggcaaggccgcaggcggaggcctcccgcccgtgacgccccggaaggggacggcgactccgcgcaaaggaacgggtacgacacccttccgcgcccggacgccggcggccaagaacgcagagtaagcgccgtttggcgctgcctccgcctgcccgcttcttttggtcgctccgtctactttcgcgtccctctctttcggtcttgttccacttccccatcccctttctcaccccgcttccagataccggcctcgcgaggctcccttcccttacttcgatcttattcccttttgacgtccgactggccctctgcgagtgctagtgaagcgagtctttgtctgagggaacgccctgcttacgatggacggcttggccagccttttgtggacggacctgagaaaaagtcttcgttgattgtgcactggctcagaaacgggagacgcttgctgaaacgggagacgggatgcagagcgaagagggcatgtatggcagacgagaggaagcgacaaaagaagctgaggtacagaaggagctgtcttgaaatgagggaaggtcaaagaggtcagcgctctactctgggcaactcgtcaacggaacagaagtggaaaaaataggtgggagctcagacatccaaggaagaaaaaggccctcatccgttcccatccgccaaacacgcccgagggcggctcgaccctcctggcacccccacgtcgacccgcccgcgccatcaagatcgccctgaagcgaccgaggcggcctcctcccggtagcggggttcgaaaccaaccgccgggtggaggatagtggcagggagggagggcgccttgaatagcccggagtagggcaggatggccagccgtttgacgggccggaccccgacttgcgggaaggggaaacgatagagtgaaaactgcgaagtggaatacttaggttgcatcattgggaggaggtgggtgaggtgggatggcgggtgggaggtgtagagtaggcggtactcacggggtcaagagtaggcgagagggaggcagaaggtcagcggcgcacaaaggcgagtctggtgtaacggcagtaaggaaaggcaggtcaatacgatgtgcgggagacggcacagacaaaaaaggtaaggagggtaggagggaatcaggcaaaatgaggctggcaagccccaaaaggtgggtcgtcttgcgacgggtcccgcggggaggtgcgaacccccccacctctgtcgtctcggcatggtcgataggacggggagagaaataaaaattgaagtcatcactttgagaaggaggtggtggtggtgttgtgggttgagggagggaggaagtcggccttacctggtcagcgagaagggaggtcggctgaggcgatcgaggttcagggagcgcgagtcgggtctgaggacgcggaacagaaggtcagcgaccctgttcgacgacgacacggaacgggacgaccccaagaccgcgagcaggaaagctcgtcgaaggagaggaggggggtttcagggaaccggttatcgtccaggaggcggcctcccttttggggagagctgccccgcttcagacggcacttcctattgcatttgatggtaatttctcatcctttgtgggaggagggagcggcggaggagagcacagaggaagcagggacggagggacgtactagcagagggcggccatcttcggcagcagggcaaggcaggcaggcgggcggtcgttgtcggacggagcagagtaagcctgggggggcaaatctctagggcgggcgcgcgcttgcgcagaggtttcgacgcgcgagagcggtgcgcacgtgaccccgcgagacgcgcagccgaccaaggagcgtcagcaagtcagcaagtcagcaagtcggtcaagtcaaggcgagcttgggaaggacaggtccgagagagcagggcgagaggcagagggcgtagagtcggcgcgagatctgttgcgagcgcgagcgaggaaaaagggaaggagacatcatctcgcaccggcggtcgcacccttccagacgtacttgcgcggccaatggcgccgcatctcgtcgctcgactcgccctcgtggccctcgcggaagcagccttggcagtagaggtcgccgtcgcagccggggcaggcgagctcggcgtctgacgagcagatggctaggggcgagggcgagggccaacgggaatcgggtatggcgtcagcacgtacgtcgtagggtgggtagaaggcagacgatcagcgtcgctcgaacgcgtacagcaccagctctcgaccgcatcgtcccgggctgcccgccagccggcaatgtcgagcagctttggcgcagcgccttttggcacagccttggcggcagtcttgaacttgggcgcctcagcagacggcgtgagacccatgagacgggcaaaggtagagtcctccgctccagagtcgggcttcgggaagtctgcgaggacggacggcgtcgagagggcagccaggagcgttgagaggtcgcttgagccggtcgaacctggcgttgccttgacggcaggtcgctcagcgccgtctgctggcggcgaatcggcctgctctcgatccgaattctgacgtgcctcgacagctgcggcgtcgagagcttgtagcaagacctcgccttcgtcgagatgcgagtctccgccggcgtcctctccgtcgtcgctctcgtccgtctcgcgcccctcgcgatcgtcgatgccctgcccgttgacgggatgatgaggaggctcaaccaggcccgccgtctgcctcaggagcttggcagcctcttgcctgagtgaggtgccggctggagcggagggtgcggagatgtaggcgagcgccgcgccgtctccgtcgtcggacccagcctcgaacgctgcgaggtacgcttcgacctgggtgaaaggtgagaagcagattcagggcctagagcacagcctagcaggccacgtctcagctcacgtcggcgtccacgagctcgtctggcgcggaagttgagtcggcttgaggaggaggcccggccgcgggtgagtcgctatcgctatcggcgccagcgcgtccgcccttaagggcggcgaagcgggcgagcaggtcgtcgtcgaggttgcccattccagatctgaggaactaggccatccgagagcagcaaggagcagcagaggtggcggtgatctgtcgtcgacgttggcaggcagggccgtcgcagccgttggccgcccgctccttgcagctgcgcgcccctctcccttgttcctcgaccgcatcctccgtctcggcagctctcagcggacgggcacaggacgacagactcgcacatcccaccttcggacgtaggatggccttctcgagtgccctggccctggtcctccggcgggcttcagccggcctgacccgcctggctgccctcgagacgtcgacgtcgacctcctccagctgccgaacaaccgtcgtagcacttggcgtcagctcggctcggtcggacagcctcgctcggttccacaacaacgtcagcgggcgctcggcctccataacacctgcaacagggcgggtcggcgacgatccgctccgggcggccgttgctcaggaacttgtcgctctgggagccgagcaacgggagctcgagactcgactgcaggagctgcctccaatagtgcgttcgcgtgcggtcacggcgctcatcggatgaaggattcagtcgctgacgtctgccgccctgctctctgcgtgtagacaagctccgaattgccaaagcccgcgccgcaacagtcgccaccagaagcccgaccgctcgagaaggagtcggcaaccggaccggtcgctaagccgagaccggcgccgaccactcgggcagacttggctgccgagaccggtcggagtcaggtcatcatctactgggactttggcgagtccagggagtgttcaatcgctcgcgtcggagccctgaccgtcgcctctcccctaatcgtcatccccgctcggtacagagaacctcggcctgaggcggaccatgagtccgaagatcgtccagagcatcttccgagagataacggcaccctggggcgagctgtccgacactcggctctacaatggccaccctaaactgtcgccagactttcacaatgccggcatcagcgtcatttactgcccgcacggcggtctgaagcagtcagtctattccttgcttgacctggcgcgctgccctggctgagacttgcctcacagagtcgtcgacgaccgcatcgggcgcgatctgcaaacacttgcgcgcttcgccgccaacccggccatggtgacggtttgcatcatgtgcgtatcgctgcggaggctggcgtcgcccttcgtctggctgatcttttccttcttcagaactggcgactcggactttatacctcatctgaaagcagccaaagcgcggtgagtcattgcctgccgtcgtcttgatagggggccgaacctcacctcgcgcacacctatccagcggcttccgaacggtcctcttctcggcatctcgtcctggatctgcgcgcgctctgaaggaagctctgacggaacaagtcgttccttggcgccctctcttacaggtgcgcgatcaaacgttcagtgtgaagcgcgccggtctcgcgctgactcgctcgactgacctggctgctgcgtcttgcaggaagcgctcaaacgctcaaaggcaactggctttctaatgacccctagctggacgttggagacgccggggccgctcatttacgaggccgagccgctgcggtcggtcaacaagcccgacgttatggccggcacgcccgcgtctcctgtcccgtcagaacctttcctcgcgcctgaagcccaacttccgtgccgctcactgacgctctgtgtgccaactatcgagcagagcccttccggcgggacgtcatgccgacgatcgagacgacgcatcgtcgggacccagcgttcgcagtgctcgatggccagccgagagtctcacgtcctcttgtcaagtcgtccgctcgcctgactacgtgcctgacctgacctgcgctgaccaacgcgcgtgtctcttttcaatttggcgtcgatgagacccgtgtctgtgccctgttggatccgcagagcttcggagacgcctccacgctttgtcccgagtcgatcaggttagaggggcgtccacagagtggtctggagggggtgggaggggccgagagaaacggccacggcctcttgtcacattgtaacgagacaggtaccgctgcgctctcaaagctcggacaaggccgccagaaatcccgtgtcgggaggattgggtcatatggtcagctagctcaggagggagaggttcacacgcgtcctcgagacgagggtcgcccgtctgctgcgcccgcgccgccgcctgcctgcttcgccctcgaccgcatcccttctcatctgcttctcccaggcgcctctctcctgatcgccagaatgtcttccgcgaacgtcttcgcgcaagtcctccggcgagcctcggtcggcctgcaccgcctgggagcgctcgaggcggcgcctggcagcagccgctcctcgtctggctctcgactcaacacctgctcgcctcacttcggctgttctacccgagcctacagcgacggcggcagacgctcggtctcgcacggctcgcaaggccttgaactgcccgggcgagacctcgtcgatcaggacccgctctgggaggctgtcgcgcaggagctcgccgctctgagcgtcgagcgacgggtgctcgaggctcggctgcaggagatgagcctcgaagtcggtcgccccgtcgttgaggagtgcgggcacgatagactgacgctatcgctgttcttgcagtccagctcctcagagacgatgcccgtagcggtcgaatcggcggcgggcgtctcgctgctctggaacgaggcgccggcaccagccgaggaactcacaccgaagcggccagagccgccagtggccgacgaacctctcgcagcccccgcaggtgctgggcagcgccagataatcatcatctgcgactacggtgcgcctgcttgtcgcccgcaggcaggtccctttgaggtagtgcgctgaccgccttggctgcgttcggcggtagagagccatcccccgttccaccccaacggcaacgacgcagaggtagtccaggagaagctccgagagctcacagctcaatacggcgacctagccgacatccgggtttatggcgagacagatttctcgtccgccgtccaccaagctggcttcagcctcatccactgcccgcagggcgatcgcaagcagtcagtccgtcgtcgctgggcgctcgaggcgctttcctgccccccggctgacgtcctggcccagcttcatcgagcatcgtatcgggcgtgacctgcgcaatcttgagcgcttcattacgaatccggcgtcggtgacgattggcttcatgtgcgtttgcgccgggctcgccgtcaccgagaaccaacgactgaccgacacgcacgcgcttccagaactagcgactcggatttcattccccaccttcactcgctcgcttcgcagtcagtaggcaagggcagtccatcaagcgcgcgcgcggacgtcaggctgacgttgctcgtctttccccagcggcttccgaacgctcctcttctcgagcgtgtcgccagacagccctctggcggccgctccgaccgagcccctgatcggcttggattcagtagtttcaaaggtgcgtctgcaacctgacgatgtctttgaccgcctccgagcgcgctcggtcgctcgacagctgacgtcgcgcgcccagaacgtttcgagactgtgggcattttcattactgccgacttcgaaaagggaaaagaagtctcaaggaatcgcggacaggaaggctgctaaagcggccaagaaacttgtcaaactggcagccgccaagaaacttgactcgaagccggtgcaaaaggtactcccggagccttccaaacaaaagtttgtcgtcttgaagccgatgcgaaaggcactcaaggattctgccggaatgccagtcgcaaagaagtgggcctcgaagcggctgcagaggaccatctccgagaaggccatcccgacgccggtgcccagacatacgtcgtctccaatggacgacgtctgggccgaagttcacgcgctctgacgtgctggcctcgcttttgtcggcctcgtgcacatcccctacctgccacccctcgtgcgtggcctctgagatcaacaagacgtttacattcagcccgagccgaggaagccgccgacgctgccttcgcgcgcccggcccttacccttcttctgtttctgaacttcgcgctcgagccgggcgatcgtccgcaaggcgaagccggtgcacgtccagacgccgccgatgacgccgacgagccggatcagaaaatggtagaacgaggtcgtccgctcctggagcgtcaggtggatcggctcgaggtcatacttgaagaagatgcctggaaggatggggcaggcgtcagcaagagctgtcaaggggttgagcgagcgctcgacacgcaccgggcacgcccttgccgtggtcgacctcgcgcttgtagtcggtgaccgagtattgattggtctcgagcttcttgcccgagctcgaaacatatgtcgtcgggacgacgagcagaaagtactgcatgatcgtaaagggcgtccgggcaatctcgaccgacatgtcgagcggctgggcgatcgaagggtagtagtcgccgaacgaccactcgtggatgatgtgtgagaggttcatgactggcggggggagtcgtgggcgtgagttagggcgggcggaaaaaggcaacggtccagcgctctcggagaggccgcacgggagtggtcggtgtgctcccaactcatgtagccgtggccgagcgtcgtcacgtgcaggttgcccgtgaccttcttcaccgaaagcgagccatagatccggcacgccggcccatcgtcgacaatgttggtcgtcttgcggtaggcggcgtgcttgcggaacggcgacgagaacgagaagagcgagcgcaggccggaccgcttctgcgagagtgcaatgatgtcggacgccgacgagcgcgtcgtcgtgtcggtaaagtcggacgtccgggccgggtcaaagagggtctaaggaagataggagggcggaccgggtcagtagacgggtcgccagcggcgaacgcgctcgcagccgagcgccggcgacgcaccccgtccttctgaagcgagtcggtcaggtagacccggtcgccaacagcatcccgaaggtcgaccgagaggtctggatgggggttttgcgcatagtcagaagagggagttagttgcgagcggggtgagctgctggctcacagtgacaaggcatcgcgaccgtctgcgggcggcgacaggcggggtcagctcgctggaccgcgagatcctctacggccaggtcgacgcaccaagtcgacgttgagctgcatctccttggcgacggcacggtcaacgtggaaggtctcgcggaggtcaccgtagaggtactcgcccaggtcgttcaagacgagcaggaagatggtccagcagacggcggcggtgatgaagccgccgcgggccgacttggacgtgtacgacgactggaccttggggaatgctatcgaacaggtgagcgcggtcagacctcggggcagggcgacgaccagactgaagggctggaggctatgacggaccgtcgaacgaccgaaggggagcgacgctgtcgagctgagcgaggatgccgtcgtcctcgtccggcttgcccttgctcccggtctgggtcggcggcggcagcggcgagggtgaccggtaggacgacgagtgcggcagcgaaggcgccggagaccgatacatgctgacaaggatggagcagggcagggtcgacgcgagatgactgtcgggaccgtctctctggcgaccggcgaagggcgaaagcctctgcgcgtgcggtcgcggcgcagcgattccgccgccgacgacagccaagccggacaagacggcctctgtcgcttccggagtctcgattgacgactcaggctgcccacagactgccggacgttcgctagtacgtcaccccgctaggacgagactgccaggcgtcccgcaggcgggacctgcccctcaacttgctgagcgctgatcagacccctcgagtcgttccatgcggagagcagacataggatcgggttacgcccccgcccctcgcgtgattgccttctggttgggcatcttacggctctctttggcaaagtcgtcgaggtcctgggccgaaaagtagtggctcgcggcctcgagcagccactcctgcgaagcggcaagcaagcacacagtcagccgatggcccccagagcgtatgttctcgagctcgctccggacgcactttcttgatctccatgatctgccgtgcaaactccttgctcgtgagcaccagctcgtagtagaggataaagcgcgccggcggctgcgacttgaacattgacgacgacgggtggatgtggatggccgagtctgggaggagcaagggcgagtcctgggggtcagcgattggaacaacagaccgcaggtcgcatggagaacggggcctcaggacgcactgttcttcgtcgtccggtagccgccgtccttgtgcaggcgggcctggcggcagaggaggagctgtcagcgaggcttcttcaagagactaacgaccacactgatggcgacgcaccgtgttctgaaagtagccggcggtgagcgccttctggatcgggacaatgtcgctcgagttgggattcgactcgatgacgacctcgacacgctcgcagagcgctgccagctggtcgcgcacgtcgcgcacacgcgtcaagcacttgtactggacgtagttctgcgagagttggaccagggcgtcagcacgcgcacatcaggactcgagcttgcggaagaagatgcacctcgaagcaccactgctgcgagtagtcggtatcgcgccaggtgtcccagatgttgagtagcgtgaaatgatcgccgccgggcttgatgaaattcttgtgcgcggcgtcggcgtggaccttcttgtccttgggccggtaaaggagcgcgctcgactcttggagcatcgagatgatcgagagcacctgcgaggccgagaatcgaagagagggtcagcgctcgacgtctgatgatcgtttgaaccggccgacgcacttcgtccgtgcactgaaacttctcgctcgaaatgacagccttggccagctgcgggtcgaccgggaactcggccatccgccgacccatgcgcgtcagctcgcccgtgtggttgatggcgccgagggcgtagagctgctcgatgctcttcatcagcgtctcagccgcgggcgggtcgaggaagtcaaagccgaggaggtcgttgatgccgagcgacttgaggagcaagacgaccgcgcagaggttggttcgctggatctccgggaccgtgttggcctcgagctcgttgttgaacgcccactttgtgaacagccggaagcactggccggggccgacacgaccggcacggcctgctcgctgattggccgccgctcgcgagcactgcaaggcgaggcagaggatgcaacaggtcagcagacaataccgatcagactcgagactctgaaagcacgcaccggcacgaccatgagcgactccatgcccgtcttggggttgtaagagttttgcttgacaaagcccgggtcaatgacgtagacgacgccctcgatcgtgattgacgtctcggcaatgttggtcgcgaggacgaccttgcgcgagccctcgggcgtcggctcaaagatcttggcctgcatgtcggccggcaggttggcgtagatcggagcgacgatgagctcgggcaccttttctccgagcgcccgactcgtctctgtgatattttcggcagcagcctcaatttcgtcttggccctggaacgggcgtgcgtggtcaacatcacgttgcgtatcatctgcatcgggagacacgagaaggctcacagtgaagaagacaaggatgtcgcccttgggcgcggtgacgtgtatctggaagacggtcgtgatggccgcgtgcagatagttggcctctggctgggccgtgtagcggatctcgaccgggaagcgacggccggggactgtgtgtgcaaagcgtgatcagcactcttgccctgctgcggcagacaggccggcacgggaggacgcaccttcaaagacgggcgcgtcgtcaaagtactcggcaaacttcttggcgtcgagcgtcgcactcgagatgagaagcttgagctcgggccggaagcgggcaatatcctgcagcgggcgagcgagcgagacgcagtcagcgaccgcgactaacgaggcgagtgcctttgacaaggacggaccttgacgagaccaaagaggatgtcggtactaagcgtccgctcgtgagcttcatcgatgatgatggccgagtactcgctcagcgatgggtcggcgaggaagagccggagcagcatgccgtccgtcatgtagtggaggactgtcttgtcgctcgtcgcatcctcgaaccggatcgagtagccgacctcggcgccgatccgacagccgacctcctcggcgacgcgggccgcgaccgacatggcggcgacacgccgcggctgggtgcacgcaatcttcatgccgttcttggtgtagccaccctcgtgcaggtactgcggcagctgcgtcgtcttgcccgagcccgtctcggccgtcacaatcagcacctggtggtcggctatcgcctgcaggagctcctcgcggaagccaaagatcggcagcgacttgcggacggcggcaatcttgtcggctgcagaggaggtcagaagcatagtcagcgggctatgctccgaggcgacaggcagacgctgtgacgtaccttttgtctgggcctccgagatggcgtcctggagggccttctccttggctgtcatgccgaccgcgcccgggtccttcatagcgccatcgctcatccacttgatctgctgactctcgtcaaagacctgaacaagagacaaatggatggtcagcgagggtctcacaggttggtcggcaagtcaaccggggacccacaaagtcgtactgctcctcgacggcaaccttgtcgagcgcgcccgtcttgaacgtgctcgcctcggtctgccggcgctcccactggtcgatgtcggtcataaatttctccttctcgtccttacggtcgacgaggctgcccgtcttgccgcggccggcctcctcgtagcgcttgtagaggacgttgcgcttcttctcggcgtcgagcttgccctgctcggtgatatagtcgtcgggcatctggtagccgtcggttccgtcgtcgatccgctggcgctcctccatgatgcggaggagctcctttttgcgctcgagctcgcgctcttcgcgcgccgtcatcttcattccgtggaagaggttctcctcgtcgacaatctcgagccggaggaggtccatctgctgcgcctcgcgcttcgtcaggtactcctgccgcgcccggtcacggagcccgggcaaggcctggttgcgcgcctcgcggtcgtcggcgagcgagagccgcttggcaacctcgctgtcggccgcggccgacgacttgtcggcgacgagcttcttcgttttgtccttgtccttgtcgcggatccgggccgcaaaggcatctcgctcggcgatgtcttcgagccgctcgcgttcgagccgctcctcctcggtctcctcgggtggcggcgtcgcgttggcggcggcggcggcggcatcctcctcgtcctcgcgcgcgcgcttccaagcccgatcctcctcgtccgactcccaggccccagccgcgtcgccctcgtcctcacgcttccgcgtccggcgctctcgccgatgactaccgctcgggccagcccggtcgtcgtccgcggcgtctccaccgccaccttctcgccttgagcgacgcgacgacgacgacgaggggccggcggcgctgctcgccttcgcgagctccttctctcgacgacgggccgccttggcctctttgcgcttgcggcggtcctcgtcggcgagccctccgccgctgacgacctcctcctcgagcaggaggccgtacttgcggtccgagccggcgccggcagccgagcccaagctcgcgccggccgatttcttagtcgaggatttagtcgaggatgaagacggcgccgagcgaccgacgcgcgcaaagagatcggaggagaacagcttggtctcagctgacgagggtaggccgacgtcgagcagcgcctgttcaagcttggacgtcgacttgcttgtcttggctgtgcgcagtgggggggagggcagagggtggtcaactgatggacgcgttgtcttcgggccgcctgacgcaaggccagctacagatcgagtgagcgaaggaaggcacgcaccgatggcctggatgtagtcgacgagcgtccggtccgagatgcccatcagccggagcgcggcgtcgctgatgaactggtgggtcgggtccatggccggcggaggggagtgcgcggcgctgaagacgtagctagctggcggtctttaggaagggtgcggaggtaatggcggctcggttgatggcgcaggtagaccgatgcagcgttcggtaggggctcgggcgtgggatagaaggtgagcaggagaggacgagagtggacgagggaggcgaggtgcggcttgggcggccacagggcgcggagcgatgcacgagagcagggagagagcgcgcagcaacaggccggaccgaagcgaatcgcccggcgcccccttagctcgaccttctccttaccaccctccaagcgagcacatcagccatggccaagacaaagaaccgccgccggagcgacagggacgacccagagcgggcgccactcctgcctgcctcacctacgactgaggagggcgcgacgtgcgacgtcttcgcgatcgtccatcaggttcgccatctgctcaaggtaaggctcgccatgcgtcgtcttcccatggattgagctcgatcgcacccgactggtctggctgagcacagagcacaacgttccctcgcagagcaacgtcgacacgacactcacctgggagcagctccaggcgcccgacgtcagcttcaccctcacccggccgctcgtcgcccgcctctcggaccctctcagcccggccatccgtctgtctccccgctgctgtcgccggtcctctttatgttgagcgctgatcttagtccctgacatcagtctacgcgttactcatcaaccggatgtacttctcgcgcctggccgagaccgacctcagctactcgtccctccaagccacccgtgccggtgcgtcatcgcgacgggcgttacccagccttcctgccgacccaggcaaatgacgaagaccctctcactctgcaatctttgcgcccgctcatcaccagactttgccgagctgctggcgatgaagctgctccggctctttgcagctgacgacgtcgcgcttgtcggtacactcgtcgccgagtgggacgcctttcaaggcgtgcgtccggtcgactctccctctgctcgctcaccttagccgactcgagcgttgctgatcgtgacatcttcattatgcaggcgccggtcgagttactccggacgaaggatgaggacgaccttgaggaaggcaggcgctcgacgctcgaggtgcgactctcaccttcccttcctctgagcgtaatctctgctcaacctaaatgctccgcttcgacccaggtcgccatcctctcgctctcgaaacgttttctctcgacacccctcctccagcgggcaattgccctcgtccactccggccagatcctctacgcctccaccagcacgaccggctcggccgcccagcagcgggcgctcctcccggacccatatgccagccggaccgtccgtggtcgggatggacgatcggtctggcgctttgacgctcggagggcaagggagacgggcggctggctcgggacggaccggcttcgggtgcccaagtggcgcgagatgattgagctcgtcaagtgcgtgccttcctctgggatttctctggacgactacaaggcaccttagcctgacgtgttccatgattcttgcaccagctttgcccttatcatcggctccttcatcctttgtgagcccgccaagcgaccttcgactcgctctcgatccctgctgacactctttcgtctgctccacctacaggcgtccagaataagcagcgcgaccatatgccctggtccgagattgtcttcatcgtcatcgcactcggctttgctctggatgaggtgcgagtcgggcgcggctttctccctcacggatcgaaaccaccgtcgagctgaaccgacaattccctctctctccgtagttcgccgcgaccaaggagcacggcgtcgccttctacacgcagtcgctgtacaacggttcgtcctgttgcccgtgccgctgcctgctggacctgctcaactcactcgcgcctgaccctcccgacgtttaggcttcgacctcgccttcctggccgtcttcttcggctatctcggcctccggacgcacggcctctggtcggacaacccggctgtctcggacctcgcgtttgacattcttgcctgcggagcagcaatcctcttccctcggctggccttcaccgtgctcaagaatgtccgtcaagccggacccttcctcccgcgcactcaatccggcccatggctgaccctgtgcacccctcgccgacgtcagaacgtcgtcatcatcgcgctcaagcagatgctcctcgactttgtcctctttatgggcatcgccgtcctttccttttcgggcatctacttcgcgctcgtcttcctcggccaggagacgtggtcgaagaaggtcggtcaggcgtggtggtcgccgttccacacgagctgacactttccgcctgcaacccctgctgtccaccagagtatcgcctggctaatggcccagatttggtgcgcccgcagtcaaccacgggacagacctcaaagcccatgctgactgacctcgtgcacaggttcggctcgtcctacctgtcgttccagaactcggcgtcattcaaccccgtcctaggtccacttctcttggtacgtcgtgccgtcaaaaagcgactctttgggccaagcttgatgcttccatgagcagatttcgtatgcggcgctctcaaacacgctgctcgtcaccagtgcgtcccgggggagcttgttttgtcgggctgcagtcgctgattctgatcgctcggcaccacgacacagtcctcatctcgatcctgagcaaccgctacgccgtcgtctcagccgctgcccgcgtacgtcatgtttccccctttctctgcccgcaattagagcctgacgtggcttgactgtcttgttggttacatcaggaggagcagctcttccagcaagccatcacgacggtcggcggcgtcaagtcggacgccatcttctcgttcgtcgtccccgtcaacattctcgcggtcgtcatcctttggccgctgtccttcgtaacggcgccaaagacgttccacctcgccacgaaggcgctcatctgcctgacggttcgtctcgcctcgctttctcgaggcaatgagatggcctcgtactgactgctgctcgcgtctgacagacgtggccactacttctcgccatcagcggctgggaacgctggaacagcagcgattcggaccccaagtcactgcacgccaaggccggaacgattatcggcaacgtcttcgagtgcgtatcgccttcaaacacagccttcagacgcgattcgctgttcaagactgacccaccgacacgacacgcagggccttcggcgtcggcgacgactggattgacgccctcttcgcagatggacccgacccggcgacgctctcccgtctgaccaatgcacgccggagcgacgtgtcgggcgacgttcttgcccgatctgaagagctcgaggccgaggtcaacggcagccgggcctcgccctccgccgtcagaggctcgtcaaaggcggccggcaagcaggcggcggacaaggaaagcccggcaggcgacggtccgacggcgcagagtcctaagagtcctctcgcgaggctctttagccacggcatgtctgatgcgatatcgggttcgaccgcgctgctcggcgcaggagcaggtcaagacctgctgcaggagctgcgcgagctgaagggccgccaagagtacgttcggcgactccctactgacgtcctgcgcttctaaggctgacggtcgtgaccttcacagacggatcgagggcatgcttgccgtcctgacgcacggcatgcggagcgacagcctctgagcccggcccggcggaagaaggttgtcatcctcgcgagctctctgtccgaagtagctcataggctaatgtgcacaagggccgcaagggctcaaccgggaatgaacatggcgctgtcagagcaggcgggccgagcagtgagaagggctgggtgactcgaccacgatcacaaggcgcagtcaggccctccctgggccgtgtcgatgagggcgcgacagcaggcgaggttgagctgcgagtgtcgaaaagtcagcttaactgacggacgacgacgatggagaaggacaagggcaactcacgttcaagagctgctaagcgggttcgaatccctgctcgcctacaggtgtctcgctccgcgcggccagcaagatggattgctaaggtcagtgtcggacgtatgtcctcgacctctacgatggaggtcttatgcgatcccaaagcccttcctgccgcccatcctcgtcgagcccgaccacgggtttggcccatcgcgagccttcgcccattcggcgttgatctcgcggctcgcgccgtcgagcagctcgcgccagaacatctcgagcgccggcgtacggacggcgccggcggtgagcccccacgagcgggggaggatgtcgtcctgcgagccggacgcgatgagtgtctggctggggagggcgggggtcggccggctgaagatcgaggaaggagggcgagaagagatggcggtcgaggaggacaaggccgacagtcggggcgcggacgcgctgcgctcggctcccgtcgagtaaacacttgcctccgacggggccgagcggccgtgcacgcacgggctgtctggcgctgagcccttttcaagcgagagatgcccatgacagctgagcacgctacgagagtagctggaagcggaggcaaaggaagctggacgagataactgcgaggagcgagaaagggtcagtcaggtgaaggatgccaaaagagactgccccatgcgggcttgaaccgtagacctctcgattgctcagtaacagtcgaacgctctaccaactgagctatagggcaattttcggttgatcgcagggagattttgtctaaagtgtatctcaacactatgtctccggctcaacccccactttgcttctgaacgttgccctgtctatcactctctaggatcactcccatgtgagctgaacttcatggtctacgtccacactggccgccaagcgtctctccaggaggaagccagctgccgaggtcgccgagcgcgtcgcttgggtccgccgctgcctgtcgagctcgagcttgctctctcgcccgccctcctctccaacttcaacatcgacctcgctcagcgcatcctctcgccgcttcaccctcctcagcctcgcgctctactccttccacctcgccatgcgcccctcgctacgtctctttggagccgagctcatcgatatgtctcgccgggccgagtttccgctcgtagccaagccaggaatagtgcgtccccctcgttctcccctgtgcatagctgctcggccgtcactcataccttgcagcacacgctgacacctatcgattccgctgctgtcgtcacccagggccgggcgaaagtcttcttcgaaacggagccgttgtcgccgcgcgtgtacccgcaacggaaagcgtaccttcatgggcgctactcggcgatgctccagaactctaaggtcatcctcgtcttccagaacaacaacttgacgagcgaagagctgagtgcgatcaaggctggcgttcttggcgtcaaaaagccagagggcgaggagggcgtcgtcatggagatgatccgtggaggcctgctctcgggagcccttaagaacggtctgtcgcagcttgcctctttggccccggtcaggcaacgaccgcttgctcgacggaacggctgacgtgctgtgcgggcctctttgaagcgccagagctttcggagctgaagaaagtgctctcggggccgatgattgccatgcactcgtcgtcgccgccctcaccagcctacctcgccgccctcgtcaccgccatcaacaaagcaaccgctttcaagcctccagcccgggcaccaacgcccttcacgtcgatcgccgcgctctctgtgccgccactggcctcgatgcccgtcaaccccaagatcttctgcgtcggtgccgtcgttgacggccaggtcatcaccgctgatggcgtccggacgctcggcacgctgccagacctcgacactctccgggctcaggtcgtcggcctcatcagcgcgccggctgcgcagctgagtggcgtgctcagcgccgctgctggtggccagctgagccgcgtgctggaaggcctcaaggtcaagctcggcggcggtgccgagggcgaggctgaggtcgctgcacggggggggcacaaggcagcgtagcctatagacgagcttcatcgcacagctgaggcagcctcggccatcgccatcagagaagagcgcgcattttgcaaacggcacatgaagacacgaggaaaggcggggccggaagaggcccggagaagcggtggtcaaaggcccgtcggcgcctgcgattcaagggaagaaggtactgtcagcgaagcctcctgacgggtgcggcaaggcaggcgagcggcgcacctgcagcgtcgtgtcgtaggcgcggatgagcctctcctggtcgcgcccgccgtcctttgcactctcggtctgcgagaaggcaaaaccgcgcgaccgacgtagccgctgcgttgcccggacctttttgatcgccttctggaacctgcattcgggcggaaagggcagcgtcagacagcgttcgatgggagattgcactgcaaggcgggaccgactgctcctcccgcgggcggtagtccgacaggctgtatttttgctgcagatagaacacgtgttcaggtcagggtgggagagccctgagtgtcatttaagccaggacgtacgatctcctggacgatgtggtagctcttggggtcgtaggtccgttggtagctaggcgagcgcgagcacgacgcgtcagtggcacgctcttggcggtatcaggagaggaaaggagcatgacgcactacttccagacgtagtcccggctaaggcaaagtgtcgggaagagaatgaggcagaagtagaagatgccgtcgccccagaggcgggggacgatgccagagtactcgcgcgagacgcccgtgaggggtgcaatcagagcgtagagtgggaggaacgccatcgtgaacaggaaggatcccggaatggctgtgcgaggggaggcggtcgctgtcaggaactggccttgcgggcacgaaagcaaggacactcggacgcaccggcaagcgagtacttcgtccagagactgaagggaggaggacagtcggatcagcacagctcgctggcagcgaccgaggcgtgaggagacatactcggagacgagagccgctttgccgaggaccgttaggaggacggcgaggtaaagcgtcgtgccccaaacccagtggcctccgtcggcgccgtcggccgcaatcaggctaccccagaagacgcagagcgagaggatgaacagagcctgcgagcgggaagacgaagcgaatcagcggtctattgtttgatgcacagagggctgcagcacggtcaaggccacaccagagaatggtagatggcgttgaggaccgagagccagaaggcctttggcgagaagaagtagttttgctggccgagccggtagagctgcggataccggtcgagcatgcgagccgagacgaactggtcaaagatgccgatgacgagcgggggcaggatcgtaaagacgacgttatagagcgagagcgaccaggattcgtaggcgatctggccggaaaagttgttgaagaacgagtactggcgacgggaggagacggaggtcagccaaggaggctttggaatggccgagagcgatcggcgacgcacgtagaactgcgtcatgtaaaggacgatgttcttgtagaaagagtagaggatcaacttggacagccgctggtagctccacgagccgtggacgagcaggagtttcttgaggtacttgaactgcgagatggcgacgtcggacgagcgagccgcctgaaggccctcgacgcccgagatgccgacgccaatgtgcgcggcctgaatcatggggacgtcattggcgccgtcgccaatcgcgagaaggatcgcctttgtgttgtccttgacaagcttgacgacaagggccttctgaagtggcgagactcggcagcagacaacagcctgggcgggcacgtcgcaggatcgtcagctccagcagcgcagcgtgcagagggatcgcagcgaccgaccttgcacataattgcgagctcgaggaaagtcgccgagagctccttctcgagcgcaaaggtcagactcttgccatctgcaggtttgagcacgaggtcagaagcggacctccaacgatggctaatgccgagtttgcgaggactcaccgatgacgagcgcgagatcctcgttgtcgcccgacgtccgctggttcttgatcgcctgaagccgcttgtggatgaactcctgggtgtcgaccatggtctcctcatttatgatgacctgtcgggcggcaggggcgcgtcagggacaaaatcgagacaggagagaaagacgggcttgaagacggaccaggttcatggactcggtgattaggcggcacgagagaccaatgttgatcgccgtctcctgcctgtcgcccgtgaggacccagaccttgatgccggcctgctggagcgtgtggatcgtgtcgggcacgccgtcctgcagcttgtcctcgatggcggtcgcgccgaggaggacgaggtccttttctatcagctcggcgacattgtcgagggcatcaccgcggccaacgatctggctggcagcctggtcgtatatggccgaccactcgcggtactcttcggacgagatatcgcgcgaggcaaggcaaagcgtgcgaagaccttcggtcgcatagtcctgtcagtgcgaggggagtggatgtcagcgagtcggtcgcttcggtgtcaaacgagtgggcgacaaacctcgaggtggaccgtcgtcgcctcggcgtaggggctgtttgcggccaggcgctcatagattacagtgtcggcgcccttgcagtagagcttgatcttgccgctcggcgtccgaatgatggtcgacatgcgcttccgggtcgagttgaactcgcagacgttgagaatctggtactcctggtcccggccgaggacgtcgacaaagatcgaccggggcttgcgcgtgtggaaccggaagccgagcagctcggcgcccgaaacgagggccgcctcgtctggactagaggcctgatagatgacctggccgtccttgacctcgggaatgacggtgtggcagacggcaaggagaccgacaaactcgcggacgacgtcagcctcgcggccctcgtccccggccagccgacgacgaagctcctcaaacgtctgctggccgccgacgtaggtgccatcgggcccgcgctcgccccgcttggcgtcctcgacgacgtcggcgtactcgacgccggcaatcgtgcactggcggaactccatctcgttgcacgtcagcgtgcccgtcttgtccgagaaaatgtactcgatctggccgagctcctcgacgagcgaggacgtgcggcagagcgcgggcgtgtcggtcttcgcgtagtacctgagcgcaagcgagaggcgtcagtccctcttgcgtaataatccgggcctgctgtgacggcaactcacatttcaaggtcggagttgataagcgaggcctgccagaagcggacgacctcgatagtgacgatgagcgaaatcggaatcaagttgttgtagaggatgatgaaggtgaggatgtcctcgataaattgcttggctggaaggaggcaaagtgtgggtcagcttctgcgacgcagcttgtttgacttcacggtagacggacccttgttgccgctgatgccgccacggagataccactggtccttcgagtagacccactagacgaaggaaggacgactaaatcagctcctgcagcatgcggagtgaaagaaccgagcgagaagtcgcgcaaaacaggcgaacgcaccgagcggatgctgctgccgaccgtgctcgcgagcgagagcgcaatgagggcaaggaagaggaagaggatctgcttgttgacctggcgttcgaccgccgtccgcttaaccggggccttggtcgcgttgcgcatgaccttggtctccttaccgcccacgacgacgaggccgtaaacccagccggtgttgcggagctgcgccccgcggaggagcatctgctcaggtccgaccgggaccttttcgccgctcgcgagagtaaaagagccggtgtaggtgtagagcgacgcgttgggtgcctccgactcgatgtggcccctgagcccaccgacggcggccggcgtcgtcagcggcgcaaacttggggtgcgcctgcttgatcttgaggttggtctcgccgtcgaggttggacgtctcgacgtagcagagaccttcgggctcgctcgagctcagcaggaccatgtcggcgcagatgaactcgtccttctccatgcggacgacgtcgccgaccttgagtgcccgccacggctttgggacaaaggacgacgtgtgcgggtcgaggacgcccgtcagacgggcattgagcgagcgatccgagttgtgccgtttctacagaaggtcggggaggagtgggacagtgagtcaaggagtcgccttggaaatgcggggaagaaggccgcgcaccagatcctcctcagcctccttgatggccgacgcaacgaggacgaggccgagcggggcgaccgtcgtgtagcggttggtcggcgagacgccaggaacctgcatgatgcaggccgtgaacaggaagaacaagttcgccgccttggaaaactgctcgtagaggaagatcggaaggaagctgacgacgttgtacttgccggtcgagacgctgttcttctcgaagcggccgccattgttaccctcgcggttcgcaagctcgtcgttgagcgtgatccggcgcgggacgccctcgaggaccttgccctgtcggcgaaggagctcgcgtgggttgtactcgacccagtcgatgccccggaaccaagcgccgacgccggccgagggctggccgctccgacgcgcggccgagtgcggtgcgaactggtagtcctgctcacccgtgccgtcggcgagcgaggcatgcctgccggccggtgcggcggcatgctgcgtcagcggtaggtcggcctcgatgctcttgttgccggctccatagcggccgctggtgaggcccttgggcgcctggtagcctccgccgccgccccctccgctgctgctgacgccaaagacgttgagcgatgaggccgacgcgccttgcggagcgtacgcatcgtcgtcgtcgtcatcgaagaaggggtcgaggttctggttccctgagggcggcggctggctcgcgacgaaagggttcggcggatcgtcgaacgggtccgcggcccgctgctgctgctgctgctgctgttgcgaggcggcagagcaagacgagtcggccgcctgcgacgacggctggatgatgtcctggaacggatcatcgtcgtcgtcgtcgaaaaagttgggcgcagcgttgcgcgacgacatggcgattgtcgaaggaggcacgcgtttaggcgagggcgggcaagggcgagatgagctggtcgcggaggtcggaacggagcgcgtcagtcccgttgtgacctccaaaagctgatcctgtgaaggccgagagaggccccaactgtctgaagagcaacggcgacatcgaaaccccagctcgaggaagagagcagactgaccgagttcgccgtcgaaagggcggggtcgtcgcggctcgctctctggaacgagacttgcgcgcttgagctgcgcaggggggcggtgaagggagacggagccggccgaccggaggttcctctagttgatgcgggcgtgtgtcctgctgagggtgggctgctgggctacagtcctagcctggcgaaagatgatcgagaggaaggaactcagtcgctgctgtctcgcttcgttcgcacaaccctccgtgctgctgctcgcgcaggcggtgcgcaggcgcacccgacggaaatcagccgctcgccgcccttctctacccaaccctgcatctcgtaggacagcccgactggcagcgcgctctcgcactcggaatctaaaagcttaaacatccgtgacccacaatcagcatggtccgtggtcgccctccgccgccgccgccttcgacccgagctcgtgctgacgcctcacttgctcgaccgctggcctgacaccccttcagcccaaggctaccggccgctccagcaagagctcaaagtcgcactcgcatgcgcccgccgccaagttcagcggcgcgtcaaaggcgcccgccggcgggatgccgttcgacgccggagcgctcgcaggccccagcagcatggactttgcgtcgttcgtcggacagagcgtgcgtcggccccaggctctcaactcggatcagctgagatggaaggccttgtagctaattgcgcatcgttcggctgaccgggataggtacctgaagccctgaggaatctcgccggcccgtcaactgcgtcgacatccctcgacggcgcgtcggcctccggcgacccctacgcccctcacatcaccaagaaggacaagcggacactcaagcgcgaggcccttctctcccgtgcgtacagcagcaggccttcttgagctctcgcagaccctcgattatcggcgcgccggctgaccctcgtcggctcttgcgaccaatgcaggtctcaatccggacgctgcttcggcctcgccttactctctctcgtcctcgtcggcccggcgtgccaaacgcaaggtcaagactgagctgacaggcggatccctctcggccctgacgctcgccctgacggctgcgccggcgacgcccgtggtggttgctggggccagcggcggagacgacgccgaggagtgggacgaggactacaagggaacgagtcggaaggcccgcaaggccgccaacaagaaggcgcaggtgactgcagcggccgacgagggcaagatcggagagggcaaaggcaagccgatgagcgctaaggctcggagcaaagcagtgtcggtaccagtcgaaattacgcttgtcggcagatcaccagcctgaccttgatcgtctcgcctttcaggcaagctgaggctgtccggacaccccagattctcgcccacccggccttccgcgccaacccatgggcgacgatccgccagcacgccggcaactcgctcgtcatgaagcagcccgaaccgccaaaggagaaaaggaaggccggtactgcaccgagtgcgggcgcgggcaacaagggctggggcgggctcgccggcgacgacgagatggagatggacatgtgatgcgcgacggtcgaggcggcgggtcgtgcgagtgcacttcagtcggggcctcgctcctctgctagcccgaacaagcaagcctgcgtgagggcgactgtctctggcagtcgatcccctgctcgtccgtatctctcagagagcggcaaatggactagtgcgatgtgtcgtcgcccatttctgccctgccggcgcgtccgcgtgagcctgaaatgagggcgcgtcgacgcgaaccccctgacagcatcaacagcctgccctgccctgccaggaccaccgactcaaagtcctttgtcagctgccgccatgcctaaaggcgatgctgagtgcgtcaccgccggcgcatctcctgagattgccgaagctcccaagcgggacgtaatggccgccgaggagccctccgccgacctcgccaccacggtccctgtcggctccccgccagcctcgccaccgccgtcgccgtcgctgcctaagccgcggacaaagctcttctttgacgagtcatcggacgaggatgctgatggccagcagagcggcccatcgcgtgcaggcccgtcgtccgacgcaatggaccttgacctgccgacggcgaccgatgacgacgagggcgaggacgaggccgccgactggcgagccgaggacgcgaagctcgacgccgagatgctcgaccagatcgaacgtatcgatgcggcttgtcggacgccaccgaaggcggccaccaccaagcgaccaaaggtggcggcatcgtccaagaagctcgggagctcggtggcgaccaaggcacgggcggtcaagctcgacgactcagactcggacatcgagttcgtcgccggccacaccggcttcacgccgacaaagaaggacgacacccgcatcaagggtcaaaaggctggcttcaactttggcaagccggtcaagagggagccggtcgccgtatccaaggagccggtcgagtcggacatccagcggaggaagcggctcgcgagggagctgcgcgagggttagtgcacgctggtccaggtcgtctcgcttcttaccacacgctgacgccgcactttgttccctcctcccagacgtcgcaaagatcgtcgagcagatcgggtcgaagggcggctaccttggctcctttcccgtccagggtttctcgctcgctaagggtgcgttgtcgcgcgtcctcaagcgaggcgtcgcatctcggcctctgctgacaggcagcttcgtcgcaggtcgcggctattgcgagcccgggtccgagatcaagctcgctagggtccagcctcagcccgtgtcggagaaggtggcgccggccaaggacgcagccaagaaaggcggtggccagaagtcgctcaaggacatgtttggagtgcatcgcagccgctgctctatcgtcgcgcagagagccccctgacacgtttcgcctcttgacaggccaagacgacggcggccaaggctgtcaataccaacgccaagaaggtcaagccgaacgacatcgtccgcttcaacaacatgcgcgacttcgaggtcggccgcctgccgaccccgacaacgagatggctcgcacccctgctcgatcagaagctcgttcacgttgagggcaaggtcattgactgcaagattccgctcgagaaggtcggcgacgaaatcactctcctgctcagcgtctggctccggcccgaggccttcgtccaggtccggcggccgctggtgaaggagaactccgagcagagggtcgcctggggcagcctcgtcaaagagaccgaagacgaggagaagatgagccggcgcaaggcgggccttaacacgctcttcgagacactcaacgtcaagccgctcgtcggctcggccatctcggctgagggcaaaatcaactcgcagccgggttcgcccgagtcgtcgcgcgcaggggccgcgaaagcctcggccaagggcaaggagcgcgaggtagccgtcatggaggacctcggcgagaacgaagacgaggaggagggcacggccatcgagcacaaggacatcgacctcatttatgccaagtgcgtctcgcgctcgccctcctctgctcgcaacgcatcgctgaccgctcgacttcctgctgcagagcccagcgcaacgaccaggatctcgccgagatggacccgccgagcacctttaccctcaccttgcgcccctatcagaagcaggcgctgagctggatggccaacctcgagaccgggtccgagtctggccgagaaggctccattcacccgctttggcagcagtggaagttcaacctctcgccgcacgagatgcaaggtgccgacggcgcaatgctcgacgtcgacgagtttccagagcgtgagtgcacccctgctttgaggctgccgagcgccaactcctgacgttgcgccgccaactgtttctcgccgatcgtccagcccagcgcttctactacaatccatactcgggcgaaatgtcgctcgacacgcccaaggccgatgcaaagacggccggcggcattcttgcagacagcatgggcatgggcaagacgctgtgcgttttccgttcgtatactgtggctcagctcaggaagctgactacctggccccttcctcactgctgttcgcaggatgatggcctcgctgattcacaagaaccgctttgccagcgtcaaggctccgtcgcagtcggccgccggcggcagttcgcccgtcaaacgcgagtcctcgccacccgacgagggctcggtcgccaagaagccgcgccggcggttgcatctggacgcgaccttccggccgatccgggccgaggtcaaggaggaaggggacgcggaagacgaggacgagcacgcccgcgacgaggccgacaagtcggacgacggcgacttccggcctggaagcgaagacgggccgcacgcgacgctggtcgtctgcccagtcagcctcatgcgtcagtggaaggatgagcttgaacgcagctcgaagaaacggtcgttgacggtgcagagtgaggcttttcgattgcttgagtcctgcgagccacgcccgtttggctgactctggttcccgcccacctcgcaatcacctcagtcttccacgactcgtccaagaagcactttctctccggctggctcgaccctgacaaccctcgccgggccgacgtcatcatcgtatgtccttcagtcggtcactcaagtagagcccagctcactcgcttcgctgctttcagacgtcctacggcgtcctctcgagcgagtaccgcaagtggtgcgatgaacgcgagctcgtggacagcaagaagaagaaacgcatgtcggatgacctcagcctccacaactgtccgccctccctctccgactcttcgtgcctcgcacgaaccctcgactgaccttgcgccttctgttcgccaccacagacgagtggctccgcgtggtcctcgacgaggcccacaacatcaagtcgcgcaacaccaaggcagccaaggctgcgtatgcgatcgaggcccggaggcggtggtgcctgaccggcacaccgatccaaaatcggctcgaggacctccactcgctcctgtgctttcttcggatcgagccctggggcaacttctccttcttccgcagcttcatcaccgtgcccttcgccaataaggtgctcaggactgagcgcagccgacctacgacaacgctaaccgctccatctgacccacaggaccggtcggcgatcgacgtcgttcaattcattctcgagagctgtctgctgcggcgcgagaagagcatgcgcgaccgcgacggccagctcatcgttgaccttccggcgaagaaggtgcgcatccggcccgctcaaacgcctagactgccaggcggctgttgaccctcctcacctcttgctttcagatcatattcgaaaaccttgaattctcgcagtcggagcggcttttatacgacgcgctctacaagcggaccaagaagcgctacgacgagtttgaccgcgccggtgccgtcggcaagaactttggccagatcttgtaagcccagtttggctcgctcttcgatgaggtcggtcgctgatccacccttctctccagtgcgctcctcatgaagctccgtcaggcggctctccacccgctgctcgtcaagacgaacgacccagacgacaatctcgtcgacgccgacgaggagagtggtctcagcctggccgacctcaaggcccagttcaccggcgactccgacagctttcaaagcaaggcctaccaagacttcctccaggctcagaaggacggtgccctccctgagtgcccaatctgcatggacgaggcgagtcgcggctgttgtctctgcaacgctcgacagcaacctgctgacccccctggacccccgcttcatcctctgagcagatggagagcccggtcctcctgccgtgtggtcattcgggctgcaagcagtgcatggtcgattgcatcaatcagcgactggatgccggcgagaagggctgctgcccgacatgccaggtgcgcccggttccgccgtggtttctcgtgagcctcctctgatgaccctctcttgacatccttcaggagcctgttaaggagtctgagctcgccgagcttcggctcaagaagcccggcctgcatatgccaaaggcacggaaagctggccagagcaccgacgacgacgagcgcgagtatacgctcatgaagaacgacttccgctcgtcaaccaagctcaacgcgctcgtcaagcatctcgaccggctcaacaaggagcagcccgacttcaaggccctcgtcttcagccactttaccgtgcgtccagccgtcgccagcaacgtgtcgcgcacacggtactgactcggacgctcgccgactccagtcgttcctcgacctgatcgagacggctctcgaccgggccggctaccgcttcctccgcttcgacggtagcatgtcggtcaacgaaaagtcaaaggttgtcgaagagtttaagcagccttccaagggcccgctcatcctgcgtgagcccgccgagcctctccctgaaggcatcaatagatctcgactgaagtcgaccctgcctcgcagtcctgagcgtcaaggccggtggagtcggcatcaacctgaccgcagccaatcacgtcttcatgatggacctctggtggaagtgcgtctagcgtctcgcttgctggcttgagcattggctgaccctctgctgcccgtccagcctcgccatcgaggaccaggccgtcgatcggtgccatcgcatcggacaaacaaagcccgtcaccgtcgtcaagttcatcgtgcgtcctccgaccgcttcgctctcgtagcccgtgctgacgttcgttctcgcctcgctgcagattggtcacacgattgaggaccgcatccgatccattcagaaccgcaagcaggcgatcgtctcggccagcatgtccaaaggcggcgccggcgagcagacggatgcccagaagagtacgtccccgggccctgctcttttgggtgcacctttgactgacatcggcgcctcatccgcttccacagaccttgagatgatgttcgacgactgagtcgactgctgagtgggctggagatgtagcagtggaaaagccgctgtgcgagctgagacggatgatctttaacgaagcgctctacgtctccacacatggaatgtgagcgagaggaaagccaggagtgcgctgagcgagacgagcccacacggcaacggaccgtgtgtgcgaccgagcaaaaagatgaagttcaagtggacgatatcgagagtagggcgggatcgcaatgctatggagcggtcccctcggaagacgacaaaggggttgcaaccaacgtgccaagcctgagcagtcgaagggcggctcgaagggagaaagggggggggcggaaggcggcgcgcagcagtgagcgacgcgtaccgtctgccagctggagtcttgcctatttcggccagatcttgttcaatttccgccggaaaaagacgggtctgcagtgggggatcaagccgagtttgaccaggagattattatctcttttttgttatacatattgggtaatttttttggaatgtcagcacggacctctcctgctacacgctggcttagcaaagtggtctactgcgattgattagaaatcaattcctctctgagggcgcaggttcgaatcctgcagccagcttatcattttggcctcagcgtgagtgccgcttccttttagcatccaacaactgctctcgcctgctggacgcaggacgacagtccatctcggcctgtgagcgtagcgggacgacctggccgccacgcaagccgcgctttccctctcctccgcgctgcttgcacgctatgttcgtcgcagcagctagcgagacggctgaccgccaccgacgatctgctgattcgcacgcgcctgccgtcggtcggtcgcccttcccggcccatgctttcgtcggagggagacttccgcggatgagctcacgccgcgccgcgccgcgcagccgcacgcgacgtttcgctcgcgccttctcgctgcccatcgacactttccgccctccaaaccagcctatggggtcgttcgccttcgatgcggctcgacgagctcgccaggtcatcgtgaagacgggcaggatacccctcccctttacctacaagaagggcggagcgggtgaaggagggagctgaccttcttcactcacctcgtctcgcacttaaccacctcttcagccctctcgcatcccttagcctgcccaaccgcccaagccatcaattttctcacgatgtccctcagcctccaccgatcgacgcccgcctctgctcgtgcgtcacctcccacccctacctcgaaacgcatctgctgacacacctctctcttcgccctcgccctctctcagcccgctcgagcaagcccactcgcgcacgcctcaacgcctttacgctctcgcaccaccggccgacggccgagagcacgcccatcccgatgcgcctccggtcgtcgtcgctcatccgctcgcccgagtcgccattccatcggcggtcggtgtcgccttcgctcggccactctgctctcccctgagcggccgtcaagcagtcggaggtcattcaacccggcccctcagcccacccaacttcaaagtctccctgcaacggagcaaccagcgacctgtcgcaaaggccggccgcgcgcgtcttctctcctcggctaccccgtgtcggcccgggctgtagccgcctgcccgccagccgccagccgcattcgtagcctcaagacacacccctcccgcgcggtcttgcgccgaaatccaggagcttgaccgtccgcctgccagacgccccaaagcgagtccggtccgcccgcccgcgcacgacggccgatcggctggcggtgctgcagcgtccatcccgcgctgctcgactccgcattaccggtcgtcagccccggccgcagtccccttgaacacgccggtttttaaggacgctcgtcggcctccttgctcgccgccgtcccttctctcggcctgcggtcctggccagattggcgatgatcttcatgtgcctctcttgaaacgcatcgagttctctgaggaagcagtccgaagcacggcagtgtgcgtcgcgggcgatgattcgggcttgccaagtccgacgtcgcttacgctcgctgttgatgggcacacgaccgtcgcttctcttcacatgcgaagagccggggcgtaggatgcaatgacagaggcaagcgtgaaagagacagtagaagagccaacagggagggacgcagaaggagaccgaaggcgaggggccggaatgaggcaggaggagcgtgaggcgagaagggagactgcggagcgagtggcctgtgtctagccccgaagcttgaggagtcctcgtcttcatcaacggcagttgctcaaggcatctttactcacacgaatgtcttgcccacagccagcgactacactcccgagacttgcatacaggacgatcagaggcctccgatccgaggatcgtgggagaacatcgatagaagaagggtgggtgattacgttgaaggtggccacgctgcgggctggtcgtaaagtagagacagggacagatgaagtgttcgtagcaaggtgcagcaggcacggatcaagcaaagaggaagcaaagaggaagcaaagcagagagggaggcagcgtcccccttctcaagtgttgtagatggagctcgaccattcctgtccatcacctttgcctccgcagccgccgccacctgcctcgaggactgcttgcgcatctccgaggccgacagtcgccgatggcatgccggtctgctgctgctgttgcgggtcgtagccgccgccgccgccgtatgagtaggcccgctgccggacgccgaagccctcgtgctcgaccgaggccgacgattctggctgggcctgctgaaggtgcagcggtaacgacggtgccgacgacggtgatgcgtagtttggccgagccatctgccgcagccatggctggtgcgttggcaggtgggctggcgaaccgggatgcggatcctgttgctgctggggcgacgcctgctggtgctggtgctggtgctgatggtgctggggcggcgcgtattgcggctgctgatgcagcgcataggccggctgcgccaggtgtgactgaggttgagggtggtgggacccgtgtggcgagtacggctgctgctgatgaggcgtgaggtgctgctgctgctgctgctggtgactcagtggcggcgtctgatagaggaagccgtgctggggcggcaacggcgacagctggtgcaaatgcggatccgagaactgctgctggaggtgtggcgcctgagggtgatggggatgcgagggctgcgagccgtgtccggggccggcgtcaaggagacctcctgccgcagagtcgcgccgagcgagctccatctcgcgccgcttgagcatttcgcctgtgatgggcggcgcagcgacaagcccgccaccgttaccgttgccgttgagggcagctgctgccgccgcgacgagaccgttgccgtcgacgctgaccttgcgcgacttgctggcgccgccggcgcgagactttcgagaggggccgcccgagaggctgaccttgcggctcgccagggcggatggcaggccgtcaaaaggcaggccgaggccgtccgccgttggatcgggcccgtactcgattgtgtcgtccttgtggcggatcggaaggccaggcgtcgtgctgctgcttgaccggttgccagtcgtcatcccgcccgggccagagggtccaccaccaggcgcctcgccggacggtgcgttcaggcacgcctggatcaggttcttgccttcgggcttggtgaccagcggctgaagtttggacgtcgtgaacgtgtagacgaggcccgtctcagagacgacgagcagcaagacttgcgtccccgtgagtgtcgagagctcaaaggcctggcgaagagagacaggtcagagaggcaactctcgagcagggtccgtctagactgcgcgtgatggcgcactttcttcatgatgcctgccttgcgcttggaaaaggtgatgtgccggcgcgacttgtcttcgatgtacttgatctggatcttcttgcgcccattcttgtccataaccatggcgctcgtcttgcctcgcgacttcttgccgcctgcaggtcactcgtaggtcaggcgctgctcgcactgaagagtgaatgaggcaaggcaagcatcagaacgaaccgttgtcgtcatcgtccgagccgccgccgccattctcgtcatcgctcaggcccgtctcaaatgtgagcgtgtcgaggctgttcgcgccgccctcattgtcctcgccgttctcgccactgtcctcgccggtcgacgtgcctagaccgtcctgcgagtcgggccgctcgcacttctgccgcgcgaccgggccctcggcctcctcctgctcctggcgcgtctcggactgcgcccgcttgcgcttctcgcccgtcacactccggaggccgacaatcggccgaccgctgctcccgggtcgttgctgctggggtgacgaggggaagccccgtccgagcgaggcatggccgttgctaggaccggcagcgaggtacgcagcgggctcgcctctttgcgaggaggctacctgagacgacatgggctgaatagcaggtgtcgggcggcgacggccggctgggcgagctgctagcggggaagggggaggacgcttacaagcgggcgaaacacctggcgcggggggatcgtgggcgacgtaagctgactgcagatggcagagcgacaagctggatggcctggcgagcgtgttgatgagagcggctctaaacgtacgaggttcgaaggcgggctgagggtcgaggcggccttgctttcgggcccccctctcagcgccggtccatcacctcctgtcgccgtcgccctcgatcgtctctggcggcgcctctcatcaggtgtccggctccgccgcctcggcaccccggcgcgtcctcgcccctcctctcttccacccaacccgaccctcttcgtttggaccaacggcctcgcagcaatgagctacgcctacgcgcgcgaggtgtcgcccgtcgccctcaatcacggttacctctcgcctccgacctcgtcgcaccaggaggaggaggaccggccgctccggcacagcgactcaatgagtaccctgcggacgatctccagtgcgtcctcctgcttgccctgcccttctctgatccagctggctgacgaccctggtcggcttcctcaggtggcgagatcgagcagtggttcgagtacgacgtcgaagggagactcgtccaggtgcgtcagcatctcgagcgatcgcttcaagggccacaactgaccctgaaccccctctttgcctgtcgcacaacccttcagaacgtcaacgacacttacctgttaccggttcgtgccaatcgtctgattgtgcgacctgtggatctcactgactgtgctctctcatgcaggcggacgaggacgagctcaaccggtgcgcagcctgcaccatgagccgctgccctcagccgactgactctcccctttgcttaacatcggacacaggctcacgctgcagcaccagttgatcggctaccgcaactctgcgcactttgtcgggccagtcgagcaggtcctggccgaggccaaggtcaggggcagtcactacccttcgatcctcgacgtcggctgcggccccggttcgtccctcgacccgcaccccgactctgatcacgttcagcggctgatttactcatattcgcttgcaggcgactggtcgatcgcaatggccgagcgcttcccgttcgcagtcgtcctcggcgtcgatatctcaccaacgcagcgctcggtggcttatgtgccagggtaagttctggtctctgctcgacgcactcaactcgttactcactgacacaacctccattgggctctccctcccagcaactgctccttcgagctcctcgacgtcaacaaggagcttccgtggccggcagactcgttcgacgtcgtacgtttcgggcgtcaagcttgccgagtgcacgcttgccgatgctgaccctctttctcggtcagatccacgtccgcgacatcaactttggcatcgtcagtccactcgctcgatcggatcatcatctgcagagactgaccgtgcgccccgccaggttcactacccaaacctcatcgcccggctctgttggcacctccggtcgggcggcatcatcctccttgctgaggccgagcttcaaattttctccgccgcggccgaccacgtcgtgcccgaggcgattcagcagtactggcagacgctccgctgggcgctccgtcagcggcaggtagacgtcgacgtcccgctgcacctctacccagcgttgacgagcacgggcgtcctcgcgaccgtctcgcacgacgaggtcggcttcccgctcagcgactacatgtcctcggacgacgtgctcgcgcactcgggcgccgtccacgcctcgacctttgacaccttcctcagctcgaccaagtcgctccttctcggtaccggcttgtcgcgccaacaggtcgcgctggtgagccgcttcatgatgtacgctcgtcattcgttcgcttatgtcctccttgacagttgctgcaccaggtccggacgtcgctctctgaccccgacgcccgctacttcactcggtacggacctgtgtggcgacgaccctctgatggcctcgatgctgacccttttccccctctgcaggtacttctttgcttggggccgcaaaccctgaccctccgttctacgacgccggccgtcgcctgcaaaatgagggcacaaacccgcccaacgccctttgatctcgaccgccattttcgctagtcgtaccgactcgaccttcttcgactttttgcctcgctccaactttgtgtcctctcgcatccccgctcgtctcgctctcgctcagcacgcggtcctgtacgccccccgtctcgacgctctcctcccgacccacgccggaagcactccttctctgcgctcgcccatcgttgctctcctttctctcacacaaaaaggcccgccatgacgaggcccgcgtttgcgacccaccccgactcctctctcttcttgtagcggttcttgcatccgacaataaaccgcttgctgccctgcttctcgcgccgacaagtcaccgatcccgtggtgcgagcgggttccatctctctgggtctgcgagggggtgcatgcgcagcaactcggagcgttggccggatgcgggcgactgagggttgcgccggttgcggccgaggccttggcccggcgcccgctcgccgcccgaggtcgtcatctttgcccttgctcagcccacccactactcaagcgttgcctccgtctgcagggcgacagcagcacacccgactctctcctcatcaacagacgaagcgaccgacacgcggacgacagcaaaaaaaccaggcttgcagcagtcagtttcgcgcgcgcctcgggctcgagtcgagccggcaagcgaccgctgctgagctgacccgaatctcctcccacagcctccttcctcgcccgctcgccctcgcctcgaggccaaaccaacaccggacagacacctcgcttgccagcagagcaggacccccttcccatccagcctcgctttggacgaccgatgtcgtcccatccgcatcaccaccatctgccccggccgtcgtcacgcaagacccgacgcgccggcgacggcggcgccgcccggaccgacatcgaccgcctgctcgacccgtcttatgcgtcgcactcacagacggcccttaagcggccgtcgatggacgcagcgacctacatcgactcccagggcgtcgcgcacgactcggcctagtcagtccctctgtatcctcctgtggtggagcgtggcgtccttggcatgcgttgggcgtgacgccgacctcgcgtaggcagagctgaccgtctacccgtgccatccacccgccctcagcaacccctttgccggcctcgacagtatcggcggcggcaacgggccgcgacgaaacaactatgcccgccagagctcgaccgacagcgaggcgagctttggcggcatcggcggcctgccgacccagtctttgccgatgggccgctcgaggagcggtcgcagcacagcctctgccatgggcgccgtcgggacggctggcggtcgccggcgcaatcaaccggcgtccgacatgagcctcggcggtggctacgactcatttgcgcacggcggcggcggcggcaagtcgagccgggcgccctccatcgcctcgactcagtacccgacgacgacgacagcggcgtcaaagtcgcgccggtcgacgctcatgtcgcagacgacggcctttaccgaccactctgagctcgtcccgccctcgccgagccggttcaagggcgcttacggctcgtacaagggccccggaaaacacaacattccctcgccgccgtcgtcggtcgcctcgtcggccgcgccgcagatctaccccgagacgcccgctcagcgcgaggcccgccggcggtcgacagagcgctcgaggccggtcaactactcgtcgagcttacccgtcgcgccgcccctctcggcgatcctgccgccccggccgaagccggcgctcgagtcggccttcagcggctcggagcgcggcggcggcggtggcgaaagcagcaccggcgcgacgagccactacgtcccgaccaagtggaaggaggagcgcgagctcaagcggggcggcgtcgacgaagagttccggccgcaagagaaggagaaggagtaccggccggcggtcggcgacaacatgaagcgcagctggaacgagatctcgctcgcggtccgcttcgggtgagccgctccagctcgacccgccttggtctcttgatctcatcggctgacgtcctacctccatcgcagcatgttccgcacgaagaaaaagattgagcgcaaagcgaccggtcgaggctgaacgcgcatacagcccgttcctcattcatcgttgtcacccgttcgtcctgtcgccccgatctcgctgcccgccaactgtctttttgcccctgcaaccacccactgtatctctactcgcacccaccacccgcggctatcattcccctccctctcgactgcttctgcccggtcggcacccgtctggcttctgtcttgccgccctcctcgtcccctgtcgcccgcacccgtcgtcgttcttgttcgctcctgccgcatgctctctctcatcttccttctcgctttcgcgcatgctctcccatggatctctgactctgtctgcctttctcgcccgacggatcggctcgagaaaggggttgcggcaaagatttctgacgcgcagaagctcgaccgccgaccgccgccggcgccgcccgtcttgacctcctgccctcatccacgcttcggcctccctttctttgaccatcgctcgccttctctcgcatactcggcacgacatggctcccaagcgaccggccgaccaggccgcgctcgtgcacaagaagtcgcacaagcgggcccggctccagcgcgggcggacgatcacctcgggcagctcgacgccgacagcgggcggcaagggcaagcctgacccgctcggcggcgccaatgcggctgcactcgggagtcagtctctctcgaggtctgaagccgagctcgctgccgggagctgacctactgatgctgcccggtcgcctccagccgtgaagagcaagctggaggggctcccgccggcggttcaggtcgagaagttcgcgctggtgcggtcgtccccttgaatccttcccttgctcagctctgacgcccgccttgtcgtccacaggcacgctccttcgagattcgagcgatgaagacggccatgaagaactcctggtgcgcctctcttgaagcttgccgagctcggcggcgcaggcgcacgggcccgcagcagctgactgtccccttgaccgcctcccgatagggactcgaacacgaagcgggccttccagacgctacctcggcaccttcggcggcgggcagcctcgcacaacgctcgccgtgtgccctcgcgcttgcgcgccaaggcgaccgcggaggtgcgctcacgtccgccgatcaccgggcacgcggccgcaccgactgacgctccgacctcgtcctcgccccgtccagattgaccccaagaccaagaagaagaagcacttcccgcgcaagaaggtgctgcgcaagactggcctctccttgactgagcgctaccgccgtcgccagcgtacgtccgcgttcgctttgatcttggtcgcacgcgcactgacgcccgttcctcgcgaccaggcgccaagctatggctcgacacgcacatttggatggccaagcgaatgcacatggtcaacgtctggggcttccgtctggcgcgttcctcctcagcctgactctctctctcttaattgttatacgcgctgaccctcctttctgtatcacaggcgcatcggccgacggcgaaagcgttccggccgtcgcaccgcgccgccatacgctcgtcgatccttaacgacgtctcgtacttctccctactggagctcaaaggcccggcaccggctctgcgggagatcctgaagggaatctgcggcgagatctgctggggcaagcggtgcgtccgctgactagctatctcgaagcgttccagcgctctgactcgccgcttttgcgacctaggttcgaggacggcgcgcgtatggccgagactactctctaccgccagggccagtggccccagggctttctcacgcccgctcaggtcatctggcgcccgctgcctgcgtctttcggctcaggcgggacttcatccgaaccaatccgccagctctggatccgcttccacccgtcgacacacgcatccgtcttttcgaccttacgctcggcgatcccgcttgtcctctcgcagccgatggtccagggcgaggaggtcaaggtcgagctcaacgacgtccgcgagtcgatctgcgtctttgagctaaccgggccgaagagcggtaaggtgctgaagggtgcgctcggcgagctcgtgaaggacgaggcgcgtgaagaggtcaagacagtgggtccttccctgtcgagttccgacgttgcgaagcagctctctgatcttttcgcttcctcccagatctggaaggagctgccgaatattgccggccccggaagcgttccgcgcggcatggtcattggcgtcaagacatatgaccctcggctgcagtgcgtgtcgtcccttgactttgccctcgtttcctggctcaccctctcgtccttgctcagctttccgcctcagaacccaaagctttctgcccagacgcgcgaaaacggcacgccagtcttcagccatcagccgagcgcgacactcgcagagtcggacctctggaacccgagcgcgcgctcattgctcgcaaagaaaaagttcaagaaggtcgagctcgacctgcgacgggcaaaggtcagtatgtgtgcattcgcagatcagctataatggagctgacgttcgctcgtctttatgcagctcggcatccccggcagccggctacgagccgaggttgatgacgctcggctccctcttatcctcgtccagcagacgctctcgcccgagatgtcgtcctcgccgctagcgtcgccgtcgacctcggccatgcacggctacctcctcttccacccgcgtggctggtcgcagcccctcctccacagcctcgtctttaccggcactcgcatcggcggcatccgcgagcgcgaggctcagtcgtttgagagcggcgctggctgctggccgcgcgattttgtcggctccgagcagggcggcctctggtggaacgccaaagcgattgaggacaagttcacgtgggaccggaaacccccggccaagcggcccaactacctcaagcacggctgggaggcgatcgacctgactttgaccgagagccgccttccatggaagcccgactggcccgggctcgtcgccggctacccgaccgatgtgtccatggcagacgaggagacggccatcaacgacgcggcacccttcgaggctcggccatacctgctgcagctcccagctttctcggacgttttcgtcactcttctccaggctcctgagccggcagctgttctcctcgaggcaatcaaccggcaccgatcgaagcgaggcttcgcagccctgacatcggcggccgctctcaaactgttcgagacggcgatggtgcgcgtgtcagtcaagatgctggcccgcggcgttgcgggcgatgtcggccccatcttcagcctcgccgatgacccggtcggtcgcgaagaggagcggctctggcgggccaattacggtggcggcaagaaaggacgggacgccgaccatgaggccgaggtgcgcgaggaacccttctctcacggcctgcctgactgacttttaacccttgctggccacctttcaggcgaccgtcacgatcccatccaagtcttcaacgattggctacctcacgtctggctcgttctcgctcgcccgcggtcacggctttgcgctcggcggcatccctctcgtcaagctcctcggcctcttcaagagagacctggccgctggccgcctgatcgtccccggccgtcctggtcaggcaatgctcaagatcgcgcccggcgcccttgtggggctcgtcaaggttcagaagcgcgagggtggcgtcgcgcgcgcggctctcatccggatcgccgagtgaccgaacatcctcgtcgaatgctacgacgcatcaagagaatcgagtcaggccccacccgccactgccgacccgctcgaccagcccctcccgccgcaaagcctcgagaaagactccgagctgctcgactgtccggtcgtagctcggcgcaaggccgagcgtctgctggatgcgctcggtcgacaaactgccgagcgagctgagcatgccgtggatgggctgcgagggggaggctagtcagctctgtccaagcgatgcatgctgtccacgttactcacctgccagaagggacgcatctgctcggcttcttcagtctcatttgactcgagtcttccatcgtcgtcctcggccgtccctattagagcaagggtgagggttagcgccggatgccttttgcgcaggtgacgtgaattgaaggacgcaccacagcctcgcatgtcgacctcgatcagcccttcgtcccggcgctcgagaacggtccacgtgccatcggctttgttgctcttgacgacgccttggttcgtccaaaagctgacggcgctgaggacggcggtcttgtccctgaccttcaagacgccagagagctgcttgacgtcccaagtgtctgcaaagcgaccgattgccgcgcgtcaggggcgctgtcatgggaaaggacaacttgagcaggttgcagctcaccttgctgcccaaagagctcaacgacagccgcctgcagaggcgtgacctcaacgttaagcgtgcggtccgcgagctcgagctcgacttccaccgagccgagattgggcagccagcgcaactgcttgtcgggcttgatctgatggtaagcttcggcgtacgcacatgcagcactgtgttgcacgaggcggcaattctgcagcgtcagttgttgaagatgaagatgcacaagacgggcccgcacacttggagctggccaggtagcacgagcgtgggtgcctggaagttcggccagaagtggcgtgagatgatctttggctggacgaccgactgccgagtcgaggcgcaatgctcgagggtcagcgaaggcagccccaaagatcgaccgaacagggctcacgctggccgtcgtctggatccgctggttaactcgcttcgagtcggccagatctttaagcatgacctcgcagacctggagcgctgtctcgccgaagcggagcttaaggatctcgatagtgcggatctgtgacgagaatcaagcgtcagcttcgacgtcaccaagacgggcaacgccagggcagcctgacctccttctctaggtcatagtccttgaccgcaagcagcttctgcgcgagcaggatctggagctccttgacgatcacgtcgcgcgactcgtagatgctgacgagcgtcgagacaatgtcgctggccttgccggagcggaactctgttcgaaatgcgagtgtcagtcttcgtctgagccccgaaaggtcaacactgcctggcagtctcacccggagcagcatcgactggctctggcgtccaatgcggatccgagtagtcgtcaaacgcgtcgtcgcgttcgtcgagcggccggatgccaccctcgtcgtcgtctatcagctcgccgtcatcgtcatcaatcagggacgcgacgatgtaacgaatcgtgtccgaccgtttcctgtggagcgagtccaattaccgcttgccgtcagctctatctcaaaaagagggagccaagcaacgtacttgaggaagcgccggatcggctcagagacccgatgcaggagaacgcccggtgggtcgacgatgcggagacagcggatcgtcgagacatactgcgagatgatgtccttggtgtcggcgccaggatgcagcaggcgcttgacgttcctgatgagggcgagcagaagtcagccgccgcagcgatcttcacaggtagacagctgcaagtcaaactgacgaagcctgaagcgcccggacaacttcagctctcgagtcaaccttggcaatgcactcctgcaaggttgggcacagtcagcagtgagcaacctgctgcacggcgatagttattgttgtgacgcaccttgaggtcaatcaacgccggcagggtctcggagtagttgacaatgatgctgaagagctctgtcgtgcgcaggtcgctcagcgtcttgcagatgtggtagtcgatcctggtcaagatcggcttcatgatgtgttcgaggccgtcctcgcctgcccacgccaggaagtcagcagcaggaccttcttcagctgatcaagcacccaaagcgccgacgtaccaaggcgaaacttctcccaccagctgccaatgacttcgcgcccccattggcgcagactctcgagctggtagtcggtccactcgcccgcgcactcgtcggccaccttttgctcgattgcgcggtaggcgacgctggtgatctcggggccgtagcgggtgagcatgctgagcttcgagagagcctgcgagcccaaacctgacggcgacgccggcagggacatgaacggcaccgctggcgattcgaatggatgcaaggccgacgtgtcttgctgttgcgctgcggcgtgcgcttcaaatgacagcgcaaagaagcgatgcatgaggttggggaagattggaggcaagcgcaggtgcagcgtctgcacgaagtactcgtggaaaggtatggagaggctgggactggaggacagaaggccgactgtgtcaggcagtggccgccgagcaggatcgcgcatggcaactcacttttcgaaagcagccagaggcttggcccactccctccgccaggaaagcagtcgctcgaacaactggttgctgatgatgctgaaaccggcatcgtcatcgtgcttcttagcctgcgaagaggagaatgaggacaaaaggtcagatgccgacctctctcgcgtcgcgcgacgcgtcctcgtctgctgcgcctcagcggttggggacgggggcagcgcacctccagctgaacgaccgccgcggcgacgtcgttctcgaccaggtagaatcgctcgtccacggagcctggatcgcattcaggtcaatcagtcgccgctcgcggtgccaaatgcagagagtgacgacgaacagtagaagtgcttcaggagctcatccgtcagttccgcgtcggcgagccagcggaaagcgtcgaggacgccagcatagtctgcggggactacatgcagcgtcagacagcgtagactggcacggtcagtccggcctgggagggaagcgcacctcctgtccagctcaagctgtcgatctgctgaggctgaaggaaagcggtcgcgcggtcccaggcctaggtgcagcagggcggccggcaacgttagtcacgagtcaacgtgagcttcgggtgatgtctgacccactcttgagctctgcgcgagctcttcgatgtcctgcgagcccttactgagagagttgagcgaggccttgaaggccgacctgacgtcggcggcgacgtctgagtcgtggcctgcggacatggctcgcgttctcgcacggattgaagcgcaagatccgctttgggggattaagttgctgccggatgtgatcgagcgaccaatggcggtaccgctgctgagaggagtatagggccgggtcgacgcttgctggataccgacgacggctgtcgtgctggtcgagctcgcgagcggccgactgagccgaccagcaacgtcgaccgctgcaccgccgctcgtcccacgtcgcctcttctccctcgcaccttctgccgcctcgtcagaggacagcccggacggaatgttccgcccgccgctctctccttacctgctccgggcgccgattccgtcggcgctgccgttcttcgccaagttctttggcaacccggcgaccccgccgccactggcggccgccgcagcctcggctggcccggtcaagtttgccttctcgtacggcgtcgcgtttgcgggcaagcctcggcgacggggcgagcagatccctcgcggtctggctggcggaggcgagaaaggctcctggcggtcggccatgctcgcctggggcaaggagcgagacgccggcgaggacttcttcatgctgcgcgaaggcgaggagagccaggtgcgtgcgctcgctcgaggtgctctcggcgcccttccttctggcgacgctgacaagagtcacacgttactgctacagccctcggtcgtcgcggttgcagatggtgtcggcggttgggccgagtcgggcgtcgatccgtcggccttctcgcaggctttgatgttctacgcttggaaggcggcgcagaccgacgcgcaccgctcaccgtccgagctgcttcagcaggcctacgacggcacgatgaaggagtccgaggtccgggcaggtgcgcgcgctcgccatcaggctgctaggtgctgtactgaccaggcatgtcctcataggctcggcgacggcttgcgtcttgtcgctcgacccgacgaacggcctgctcaagtcggccaagtgcgttgtctcgctctgcacctgtcactcctgatagcttcgctgaccagaccttccatagcctcggcgactctggcttcgcagtgattcgcaacggtcgcacatttatcgacgtgccagaggctcagcagcactacttcaagtgcggggctattcttctcccgacacacagggcgctagctcatcctggtatttccctccctcccagctgccctcgtcaactggcaaaggtcccgcaccggagaggctacgagacaaacattagcgaccagcccaaagacgccgatctgtttgacgtgcaactccaggatggcgacattgtcctgtgcttcgtgcgtcccctccagctatacactcgtcctggctcggccctgacattccgaccaaccctttcgcacagacggacggccttggagacaacattcaccctcaggagcttctacttttgctcgaccaggtcaaggtcatgacgcccccgccgtcgccaaccccaggccaggagccgtcttcgggctcgaacacgcccgatctgtcgacaacgtatgctgacgcccttctgcggtatggacggatctgcatgggctccatgacgaaggagagtcctttccaggtggcggcggccaaggagggactcgacttccgcggtggcaaagtcgacgagtgagttcaggtccctctcgtggtgaccaggagcagccatgattcgagacgctgacacgtccctggccagcttcaccgtcgtcgtcgtcgaggtaaaagctctgtagaagagccggaattgtggtgtcgacgaatgagcatctctgccgagcatgtcactttcttcactcgacgctcgtaattcgctcgttggaagcgttcattcgactaaaaggagtgactgagcgggcgcccggcgcgctgctctacagaataggagggggatctaccagacaagcaaaaggcgtaggcgaaggaaagggaggcagcagtgcagcacccatcacttggccttgtctgcagtgagagtgtcggcgatgccgtcgacgcccgagtcggagacgtcgccagccttgtcgaccgagccggccatcttggcctgaccagtgcggttctgagatgactcgcagcatgagttcaaggggtcagcactcggcggtggacgtcggagggagtagcaaagctcctcaccttgtagaacatgaggtcgctgctttcgtccacaaaggcgcagtcgcggtactgtgaagggacaaaggcagctcgagcgtcagcagcagctcatgaggcgcaagagaacatgcctggagcgtacgttgcggtagaggtcgacgaggaagtggccgtcccggtactggtagtgcgggccaaggaactccttgagggcctcggtcgccttccaggcattgtagtgcggaatcttggacgagacgtggtgcgagacgtgggtctcgcagataccgtggaggaggtagggaccgacgaagccaaggcagttgcggtcgatcgtggtgagagcgccctgggaagcgagcagagcgagtttgtcagtcggcagcgacgggcaagaaggaatgtggcagtaaacgaccgaccttggcaaagttccaggtctcgttcctgcgcaacgagagggcaagggtcagactgattcaaggctgcgaacagaggctgagaagagaagctcacgagtagtgggggacgagggggtcggtgtgctggaggaaggtgatcgagacgagccaatggttcatccacaggtaggggacgaggtagtaggttacgacctcggcaaagccgcgggtgtaggtccaggcaccgaggccggcaaagaggagcgcgatgccgaggtcggaggcgaggatttggcggtagtgccgcttgtcaaagattacagccgagggcgagaagtggttcgtccgcggcgggtagtggagctggccgctcgcgttccgggtgaggtacatctgccagccgacgagctgcgagaggatgcaacatcagcagctgtcgagcagccatcggatgagaagatgacctggcggacctgctgaacgatcaggttgacgaggacgaagagcggggcgtcgccgatggcctcggcgagctccttctggcgctcggccgtaacgttaaagccctcgacatcctctttggcctcgtcgagcttgggaaggccgagctggtcgcgcgtgcgcgggacgaagacctcgtcgcggtggatgtggccggtcgcggcgtggtgccggccgtgcgagatgcgccacgagtggtacgggactccgcagatgctgtgaaggacccagccgacggcgttgttgattgtcttgctctcggagaaagcctggtggccgcactcgtgagcaacgatccacaggccttgcgaaagcaagttcaagtcagcgatccgctgaggcgacgctctcgagcggcggacactcaccggtcgcagcgagcccggtccagaaccagaagacgttccagaggccgaacgagagcgccttggagccgtagtgcgacaggccagctgccgcgacgactcctgggatgtgcgtcgacaggtagacgaaggcaccgatgagggcgacgtcctggacgctgtcagggagaatccggccggcgggctgtcagcgatcgtcgcgcagccgcccgaaagacacctgcaccggacccaacgcacatgtagagggatgagtgcagcgccgaccgctcgtagcattcagccctgccagcacgagcgaagtaaagacctccagtcagcaagtcggatctgcgagcacagcagcgagaggtgcagcacaggcgccggccgacggagcctgtggggccggcaacgcgaagcacctcccagagatcgagctgccatcgaaagcgagcatcggcgcacgacgtacgggatggcgccgagcagctgcttaatggtaaagcctgttagaggcgaagcatggcaagagacgtcagtcgcaggacagaggtagggctcgagccagctcagggctcggatgggctcggagggacagaggtgccggctggcaatgcacctgggacgacaaacttctggtcgtcagtgtgctccatgtcggtcgtggtgtcgacctttgaggatttgacggcggccatcttgagggagagatgagagagagaaggaagacggcgggtgagggaaggggcgagggacgtggtcggagggcagcacgacaggctcgggaactgttcgttggggcggcgaacgagcgcgcgccgagtctccgcgggcaaccggcggtcagtggcgctgccgacccgatgacactgccttcacacgtcccaggatcactctctgatgcaaagacatctggcgtgggcatgcgtcatgatagtggtagtacattgaagccgtcgacgggttcgatctaagttgggggtagatgctgaggagcggaggggacagatgagagggacgagcctagtgcacaacaattgcctagcgaaggcgatgagagagagatccttgaagaggcaaatgcaaagagcgagcgcgagaaagcgaggcagcgaagagaccgaaaagggagaaagacgaaggggacacgcgaacaagcggcgggcaggggtcgcctacttacgaccgccgcggccgccggccttgatgttgcccgacatgcctgcgcccttcttgcccggccgcgcccggccgccgtcctccttgatctccttgcgacccttgtcgcggttgcggttcttgacgttggcgttcgtgtagaacgactcggccttcttcttgctcgtcgtcacgcgcttctccttctcctgggccgactcgtcctcgtcgccgagcgacttgcgcgagcgcttggccggagcagctgtgagagcagaggcaaaggtcagcgaggcggaaacaagacacgtgagaagaccggatgagactgacgctcgctggcctcgtcgacagccttcgccttgcccttgcccttggccgaggccgggatgctgggcgcagccgccgcgtcgccgccgttgacgtcgtcccaggtgaggtcgtcttccgactcgtcgtcgctctcgccctcgatgaccgggatcgacaggctgaggtcggcgtcgacgtcgtcctcgtcgtcatcgtcgtcctcgtcgtcgtcacggtcctcgtcggccttctcgccaaggacaccgtcgtcctccgactcggactcgtcccgccggttgtcgtcctggaggaacttgttcatgacgacgatcttacggatcggctggtcgacacccttgacacgcttctcgccgagcagcgtctgggcgttgaccttcggctcctcgacagcggcggcggtagcagacgtcgaggcctcgaccgtcttctcggtcgaagccgcagcggcgtcgggcaggctgacgacgagaggcttgggcgcctccttgacctccttctcgggcggaggggcaaaaaaggggatcctgcagaggagaagagggtcagcaggaagtcttcgcgacagctcaagaagcagcaggcaaggacacactttccgcggatccagtcgttgaggaccatcttggcagcggcctcgagcgagggctcgccgcccttgaggagcttgccgctcttgcgggcgattgtgctgagaagctcctcggccgcgcgagggccgtgccagccctcgtcccggtggtcaaggccgtaagtccgctcaaggtactcgccccggacgcgctcgagcagggccggaatgtgctcggtcggggtcgcaaggttctcgacccggacgacgcccttgaggacggtgacggtgtccgagtccttggacgagaccgggacgatacccgggcagtcgatcaggtagatgcgccgcatgagggtgatgtactgccagaccttagtctctcctgggatgggcgcgaccgtgcagaccttcttcttcttgagcgtgttgatgatcgacgacttgccgacgttcgggtagccgatgaagcccaccgagatctgcttcttgtccgagtggaggaccgagaactgacggaggagctggatgagcgaacccttcccgaacgagttgttgatcgaggcgtggaaggcgagcgtcggcgcgagcttcgacaggtgcttgacccagcgagcctgaggagagggtgcagaaacaaaagtcagcgagatgtcgagcaaggaagccggccaaagaggagaggagagaaaacagaaaactacggaggagaaggagatgtttggtccaaaactaagatcctcggacttggaatcgcacgtcccctgggggtcggctagtcgccggatcaactctatcgggccggtcgcatccggctctcgggctccctcacccgtcctccaagacggaggccgggttttgtggtccgccacgaacccaagacgggcgcggcgggtgggaataggtgagagggaggtttgctcttccacttttgtaacagacctaagcgtcgggtttgcagagctcccgagggaggtgcgcgcaaaaggccttgacttgaaaagtggtgcaaagggaggaagaatgggtgcgagaagagaaaaagtgaagaggcgaaagcgaaggacgaggaacgcacagtgacccaggtcgggacgaggtcgaccttgttcaggacaaagacgacgcccttgtgcgccttctccttcttgaggaagtcgaggacgggcttgcacatcgtacccatcgggtcgcgcgcgtcgaggacgtggatgacgacgtcggacgagtcgagaaccttgtagagctcgccccaaattcggcgcgaggtgcccttggcgtaaatccgctcgcgggcctcggtccgggggtcgtcgttaccagacggtccgaacagctggttgacggggactgtaggaggaggggcgaggcgagcggtcagccctgcgcgcggtgctagtcgaacggcgaggtcaaatttaccctcggtcgcctcctcctcgccgtcatcgagcgcaatctcgtctttgagaggcgcggcagcaagctcctcgaacgagccgacctcgaggtgaggccgcttgcgctgagccttcgagccaaaggtgttggagaagggctcggtctcgacgatgtgcggccgctgcggagcggggcgcagagtcagctgtcaggaatgccaacggaatggatggaaagctgaaaccggacgcaccttgccctccatgcccttgccctcgtgctcgagcagactcatcggcagcttgttgcgcttgagcaggacagagtaagggtccttgacgtgggacgagagcgacgtgcggaagtggtcgagggccgactgcgaaatgacgcgcgtgttgcctaacggagagagtgacagaggagagcgcgtgtcagctagagaagcgccttcagaacgagcaagacggaggaagagcacgcaccgaaccagcgccggtcggcctggacccgaccgttcggcgcctcgtcctcgcccttctggaatgcggcggcctcgacgatcttgccgtcccggtcacgaacggccttgcctccagtcagtagcttcttcttgcgcgcgcccttagcatcgacgtagaagttctcgcctgaaagagagaagcaaacttgcagtggtcagcacgagctcgtccaacgagagcaggagcaggagccggacggacccttgacgcgcttgaggttgaactctccggtctcgccaccgcgcttcttcttcgtgcccgagacaccagtcttgccgactccgtgcttgacgggcgccattgtgaggtgatgggaggggttgggggaagggaggaagggggctcggggacggttctctcggcggctgctcagccatccgttctaaagagatgtcgcagaggtgtaagggagggcgtgcggcttttgctggctgaggagtcgcgcgacggccttgaacaaggattctttgttgaggaggtgggtgatgaagggaggctgctggtagaagggaggaggaggaggcgcgctcctaagtgccaactcgcggcctcacgccttgtttgcaaccggaacgcctccctttctctctctcctactctgccggggagcccatatggtccgtgaagcccgacatcgtatactgtcgcgctatacccccatcgactctgctccagcgcccgcagccggctgaggagaggaagcccttcttcgagcagtccagtcccgccgccgctccgtcgatcgtcgcctgacgccggcagcggaaagacgacccgcagcgctggtaagaagggggaaagcataggcgacaatttgaagcggacaggcagacgccggcaagcgagccgaccgaccagcacacgcgagggagagggcgattctctcgcccttgcctggcgaggggagagaggaaccgaccaagcgaatcgggcggagagcacccgccggacaaagcgccaacagccttttgcccagcccggccggcatcgtgcgtccggcccaaagcgagagaaggggggttcgttgaaggaaagcgagagagtaacggcgaacgaggaggcatgaacgggtccgctgcggagagactgagaggccgtggaaccgcgcctcagaagcggtagtcctcgtcaatctcgaccgcccactgcgagcgccgagggaatcgcatccaaagtcagcttgaacgacgcagcctgtgaaaagggggctgaaatggcggaacgcacctggaacttgtcgatgaggacctttgacaggagcttctcgaccgggacgtcgtgcttctttgcccaggcgacggtgatgcgcgggtcaatgtagttgatcttcgacctgaagaggccagaaggggggggggggacgtcagctgaggagaagaggcacgtaaggaggaggagcgggagcgcacgtgccgagcgcgacggctgagccctcgtcccggtcgacgaccgtcatcttggcggcgctgcaatcaagcgcgcgcgagaaagcgtcgggagagtcaatcagccgccccgggagcgcagcaatgagcgaccgaggaaaacgcacgcgatccgctcatcgagcttgccaatcgcctcctcgatcttgtcgaccgtctgcgaggcctttgcctcggccttgcccttggccgtctgcaccttggtctccttccactttgccttgatcgccttgatttgctcgcggagcgtctcctccgactcgaggtcctccttggcgtcggcccgcttctcgttcagctacgattcgcggaaggacttgggtcagccaggaaggatggagccagggccgctcgacgagaagcgcaccttctcaaacgccttcttcttgcgctcaatctcgagctgctcgagctcctcctcgtacgacgtcacccactcgtcgtcgaggtccgactctgcctcagcacagacgcccttcttcttggtcttgtcgtcgaggtcgtgcgcctgctgccggagcttcatccgctggtacttgagcccgaggacctaaattggggaggggggtgagcgacggagcgttagacgggcaagcggcggacggtgacgacgcaccttgtcgttgagcttctgcatcgaggccgagtgacccttcgagacggccttctggtggttgcagaggacggcgacctcgcggttggcccggttgtaggcgagcagcttgtccgggattgaggccgtcgtgtcggtcacggcgtcgagccgctcctgcatcgtccaggacgcgttgtacgtccgaaagactttggccgagaggcccggcatcaggctgctcaggtgcttgttgaggccggtcgtctgcgcgttaaggggggtagctgtcagcgtcggcccgtcggctcgacgtcccgggcaagagaagacgcacctcgagccggtcaaagatctggtcggtctcctccttgtcctttttgaagattttcacattcttgaagacctgggggtcgacctcgacgacgttgaggtagcggatcgagtctttgccgaggaagtcgaaccggagctggttcggcggctggagctggaggtgctcgagccggagcgagcagcagccgaccgtgtcggcctcgtcctcacccttttcgttgccggcccggagcgcgaggacgtcgatgaagtacatggccgtcgcccgctggcgcttgcccatgtccttgtccttaagatcgcgcgtgtagtcggcccgaatcttttcgatgtagtcctggcggaagagaggggggggggcgtcagccgacgtggcgggtggctttcgacgttacacgcctaggaagaccgaccttgagcttccgtgccttttcaaacttggccatgtcgctctggcccttgagcgacgagccggcggcgagaaagacgtacttgatgttgccgttgacgttttcgttccaggtcgcgagccacgtcaccttttggtcgtgctggaccgccttccactcgccggggacgtttgggatcgggaccggggcgtccttgccgatgttgatcgtaatgtcctcgggccggagccgaaacttgtgcgtccccttctttgggtgctcgccccggccgcggaagaggcccggcggctcgacccggaagttgccaaccttctccttccggccgtcgagtaggcaaaactggtagtccttctctgcctcctcgcgcgccttcttgatcctgccaagacggagaaaggaaggaggtcagcgacggtcggcaccgagcaaagtagagacccggacagactccttcttggcggcggcgttcagcgacttggtccgatcgcgctcctcctcatagtgggcgagcatcgccgaaaagtcgcacttgtcgaggtcgtcgatgacgatcccgttccgcggcggaaactttttgaggaccgtcttgaagtcgcggaaaaagttggcgcgaaagaccttgtcctgcgcatggtccgtctcaatcatcttgccaaagaagccggcgacctcctccgactccgggggcaggtcgacctcctggccgtcgtacttgagcttgacgttggccggcagcggctcgtacgccggtgggaacaggacgccgttgtgcgagagcgtctcccacttgaccgaggcgtcctccttctggtgctcccaccagcggtactttgcctcttcggcgtcagccctggcgtcaagaaacgcagctgtcagccgaccccccaacgcggtgaaactgggagaacgcactcgtcgtcctccttcttctggttggccctggccgccttcttcttcttctcggccgccgtcggcttcttgtctttgagcggcttgtcggcttcggacgcgctcgtctcctccttcttggccgccttctccttagccggcgccgccttcttcttggccggcgccttggccttggccttcagcggcttgtcgtcctcctcggacgagaggtcagatgacgccggcgatgctttcttctttgcctttttcggcgccggcgtcttcttgctcgcggccggcgccttcttttttggcttctcgtcgtcctcgtacgccgacgagccgccgtcctggttgccgcctgagtcgctctcctccttcatcgacttgcgcttcttgcccttggcgggcgccgtccggcgcgacttgctgagcggcgcatcgctctcgctttcgctcccgctcgccgccggcgaaggcttgcgcttgaccggctccttcttgaccgacgtcggcttcttattacgcttgatcggcggcagcttcggcagcggcttctcctcgggctcctcggtcgcagcgaccgagcgcgacgggccggcctttggcgaggtcgaggtcgaggccgacgtcggccgcttcttctgcgagagcggcacatcctcctcagacatgtcggacgagtcggccgccgtcggcttctttgagccagagcggttgccgttagcgctcgggccgctcggctcgggcgccggcggcggagaaggcacgcccgggtgcggcagcgacggatcaatcttgacggccgtcgacagaacctgagcaggcaagaaagagcgcggtcagagcctgctgcgagcgtcgagcgaggtggggaggggcaagcgacgcacctgatgggctccgccaggggcggcagcggcggccgcagcgagcgacgccgggtcgtcctcggcttcgtcttcatccgagctctcgatcgccgtcttgcgcttgataaccggcggtggaacgcccttcttctgcttctttgcctggtcaagggaggatcggagtgcacaggtcagcgcatgagtcgaagaggggcgtgcggcggcgaggcgtaaagacgcgtcgacgagcgtcgccgcccgtgcgagccggacgcgaggcgacgcttctttcatctcgctcgccgctcgacgcggccgatcgtaacagcaatgcaagagagagggacccaccggcttcttggccgactcgtcttcgtcgctcgggctgtccttggctcgcttgaggccgccggcggcgtcagcggcgggcgagatggtcgacggcgcctgctcctgagcgccggccggctgggccggctctgtctccatgggctccatcgtcggtgtgggactgctagtgctgtgtttgctggacgacttggctacggaaaagctgctgagtgcagggttgcgcgtcggtgcgagaggggtatggcaagtaagagggaggaaacggcgacagggcgtcgaggcgagaagtgcgcgccccctccagacctgcatcgaacctgcgtcgctcggcgcggcgcggcgagcggagcgcagcggcgacagcctgacctcgacctcgacctgatcctccctctcctcttccctctcctcctcctactctcgccctttctctgctctctcgctcttacaatcaagcgagcgtctcttctgtcatctatcacggtcggctagcccgccctcgcctgcgccccctctcttcctgcaccgcggctcgcacgcctccttcgcccccggctcggcccgactcgccatgcaccatccgctcaacctccgcgtcctccagcggcaggacccgacgatcagtgcgatcctcgaatcgacgtcgtacgccgtcctctacgacttcaccgacgaccgctggcacaagacgggcaaggagggcacgctcttcctctacgagcgcgaggcctcggccgccggcccgtcgcgcggcctcttcctcctcaatcgctcgagtccagaaaacttcaaccacccgatcctgccgtcgaccgagctcgacatgcagggcaaagtcctcatgattgaagatgccggaccggacgactgttggtcctctctgcgccactgggccggccgcaagcgaagctctacccgtcgctgacccttgttcgacccggcttaccgcagccaacgtcgtctctgccctttgggtctcgaatggcgacgaatgccagacgctactcgaccgcctaaccgagtgcgtgcacggcagccactgaccgccggtgccctgcatccatcttcggccgttccatctgacccttgcgctcaccccctttaggatccgggattcgctccggacgagtagcctgccgggcccgctacctccaacggcggcaggcgtcgattcgcccgacggcgccagcgcgctctcttctctgctctcaaacctcgccacctcggccggcccgccggccgccccttcatcgtcgtcttcttccgggccgcatcagccctcgcacgctatcgctcgcttcgtctcttccagcacgtcctccttcaccgccgccgctcaggtctcctcatcctcatcagcatccacgccagcaacgaaatcatctcttgtagtaccagcaacgacgacgactaccaacggctcgctctcgttcaacgaaatcctcacgcgcctccagtcgccggccatgccgccggccgtcccgcctcaaccgccctacccgcactcgcctccccgccagcaagcccacctccagcaacagcagcctccacgcagctcgcccggcccgttccacgtcggaccccccggggccggcggtcatcacccctcgcagacgccgacgtcgtactacccctacccgccccaccagctgcaccaccagcagcaggctcactcttcaccggtccacacctttgcccacaatccggctggcggcccgcctccgggctcgccctccggctcacccttcctcaggcatgccatgccccagccgcatcagcaccagccgccgtcgttcggcttcgcgcctcatcaaccccatccctcgtcgccgttcgcccagcgagccgcagctcaatacgccggcggtcctcctccgccgttcaacatcgccccctaccaaccgcagcagcaaacctcgccctcccggccagctgcgggccgtgcagccggcagcttccccccgcctaccgcaacgtcgtcgaaccctctgccgcgcggcgcgcagctcctcgaccagatgttcaactcgctcggcccgccggcagtccttccatctgctcaagggcgctgaatgggtgctgtctagctcatggcacccccatttcgctctgttgtccgcgtggggtcgcccgatctgcatgcggctttgcagcgaatcctaacgtgcgaagagagagagagagctcatcaattggcggctgtcgcctgctcgactgtctttgggctcgccgttgcctcggccgttgcggctgctgcttggagcgctgctcgccgagccttccgtctccgcctgacctccttaatggcggcgacgagcaaggggacgccaacgggcgcaaacagtggcgcgtagacggcatacttgtgctcggccgggaagtagaggaggcccatgagcgacggctcgaaaaaggcttcgctcgcgagccggttggcctcgaccgcaagcgggaggacgtcgctcgccttggtcatcgtcggcttggtcgggtcgccgaccgtcatgagttcgatcgcaagctgctcgagcaggtcgaccgaccggcggatcgcatccctcaccagacgaccaacccgaagctggctgttggacgcgagcagccggccgagcgcgtcgatcgtgccgacggcctcgctgagctgctggcgcgtccgccagcgggcgagcccggcgacatctgatcgccagcttgcccaggcctgaggccgggtcagctcttggccgaccgaggtcgggcccgttaccggaaggccgatgaggacccgaaggtgggccaggtgttgctgaaggagcgcactcagggccccgctccggatcgtcgacgaagcgccgctctcggctgattcgggtgggttgaaaatgacgaccgagccgacttgcggaatgaggaaggcgtgcgcgacctcgtctgagcagtggaagcgacgacaggagtcagccaggcaagcgcagctgtgcaaccccctttttgctcgagacgcacgagagccttcaatctcaaacgcaagcggccgacgcgacgccttcgggacgaagatcataaagctgagctcagtctggggcagcttgccaaggccaaccgcgccgccctcgtcgccgatggaccactcctccgagttgacaaacgccttgaggtcgtcagcgccgacgatccagcctcccggggcaccgcccgcagcgaagggcgtgacggccagcggcgagtgaaactggacttgagaggagaacgtgacgttgtgcagcgatccgagccggtcggtaagcgagtgtcggatgactgaaacgagtgcagactcaatgtcccagtcgacaggctcctctggaccagccgctgcgtcggcgaaatcctcgaggaggagcgtgaagcgcagatggagctcaggcgcatagggcacgacgcgcgagtcggttgtctcgaccacgggcctcaaggacccatagcacggtccgggcgagcagccgcccagcttctcaatgatctgttcggccgcccatgccgggctagtgtcggccgagtactcgagcttgagcctctcggtctcggtgtcggcgacaacgagctcgaaggctgccggcaggtcgggtaggagcgagtcagcctgcggacaatctcaggcaacgcccaatcgcaaggacataccgtctttggtataagccgccccaggcctgaccgtcagcagctcatcgacgccaggcgcgctgctgagaagctggtcgagcgcctcctggagcccagcctcgagcttgcggcggccggggagctcgacgacgatctcgcgacggatcagcagctcctgtgaaaagggagacaggctcgatggtaagcgtgcatgtgcgactaagcggaatcgagaacaacagagcacgtacgccgagcatcgcacgcccggccggcgagagcgatggcagcgagaggcgctcgaccgcggtcgaccaccaccagagcgggagcgcgaagaggacgacggcccagaaggcgatgagcgagcgcgcccggacaccaccgtcgggctcgcgcaggagcaggcggtcgtccctggtgaccatatcgagagcggaatgaggaagatggcgtcgagggcgagggagagaggcaggctgcgcgcggcaactactggaccgcactgccagcaacttgcctctcgattgcgcaggattgtgatcctgctggacggatttagcaagcttcgcctctcgaaaccgccctgccggcgcgaggctcgcagcttcgcttcccctctctcaacgatgatccgctcaaacaacgaggcgcccagcagcagcagcagcagcagtcgtcccagtgcaaccccagccatcccgtgcactcacccgatccggatggccggacgccagcatggagcctgatcgtccccagccaacccggcccctgcgcttccgagagccggccgtcgtcccggatgaggcggccaatcgacggcggcagcagcagcagacgagcagcacccaaccgccagcattcgccacccctccgcgaccgatcctcgttcattccagcgtcggccggtcatcggcgtcaccggcgagcgacaagaggagagaccgcctcgccgaccttcggcagcccgagcaggtacgggtggccgggagggagcgcacccacgtgcttcccgcaccttttgcctcggacgaccagcagggccaggcagacgagccgagggcagacggctcgcgaggaagggcgctcggccccgtcgtcacatttggcggctttggcactctcggaggaggagggcccgacgccgagggtgccgtgactcccgctgcgcctccaggttctggcggccagcagcaggcggccgcacctggctcagtcggctacgcccctcgcttcgccgagcagttctcgaccccactccgccgtcggctgaggacgggctccccgacgcatccaggctcaggcgcagtcggcgactcgcccctcacggcacgcgtgccgaccccgcctggcgacgacgaaggcgggacggacgacctctaccgtggcccgctcccgccgcccgaggcgccgatgcggcgtacgtttcgcttcgacacgtcgggccgacagctcgacgaggatgccgtctcgctccggtcaatgagcacctcggactcgttgagcacgcacagctcgagcagttcgagcagccgggcaagtgtcgtcagttttgtcgtcggcgcctttgaggccgtcggtcgtgggctcggcgtcctcggctcggcctcgtcgagcagcagctcgagttctagctcgagctccgattccggccggcaccggcggcaccgcaagaagcgcagccggcggcggtcgagcgtttcgaccgcccgcggaacggcagccgacctcgaggccgtcgccggctcgtcccgccgcctgtccaaaggccgcaagctgaatcgggcaaagcatcgtctgcgccggctccggcgcctgcgtgccttctcggtcggctcggtcgcgacctcgcgcagatcgtcttcatcgtctgggagctcgtcgtcatcgtcgtcgtcttcaaggtcgcgatcctcgtccacctcgtcctcctccgatgacgagcccctcggtcggcgcaaggtcgtcgggacgcgcgagttccgcctgatgcttcccgccgggcctgaagccttgccggcgcccgacatgctcgcaccgccgaagcctgccgcgctcgccgacctgcctatcccgctcgacggtcagggcgggacgatcgtcacccagtcgctcgacgaggtcatcatggccatcaaccggctccgctcggccgagtttcaagtcccgacgccgccacctccacaagcccactcggagccggttccaccccttgcggcaccccttccgaggccgggtggcctgccgcacctcatccagatccctccgactgcatacgatgcggcgcggccgctgacaccgtctcagatcctcaacattgccgtgccagctcacccgccgccgctcgagctcgctcacacgcgcggattccagccgtcggcgatcccgtcgcggctcctagggtccggtggcgcccgaacgccgccggctgaaccgagtccaccaagctcccgcgcgagctcgctcggtcgcgaggtaacggtgcccgaggtctgggtcgatggtccgacacccgttgcctcgccggctggcttcagccctcgggacgacggctcgccatcaggttcgagtccaggagcgaggagcccaaagtcgaaggatgccttctggcttgacgtctcgtgcccgacgtgggaggacatgcgctcgctcggcgaggtgcgtcactctgctgatgctcgcctgcgatctctgatgctgacacgcgcgctccgcctccttcagctgctccaactccacccgctcacgctcgaggatatcctgcagcaggacccgcgcgagaagctcgaggtctttgccgcgctcgactattacctcatctcgttccgcgcgctcgacgagtcgtacttccgctacacggacgacgggcctgagggcacggccgccgacatatcgggaagtcggcggcggcgcaagggtcgcggccgggtcgaaatcgtcgaggatcggcccggaaaggagggtctcgagggcgtcggcgtcggcggcatcaacctctacatcgtcgtcatgccggacggcgtcgtctcggtgcgtccgtctcgtggcgcgtggcttgcccgtcgacttgttgctgacaagcttgcttgcctcgcagttccactttgaggacgtcaagaagcacgtcgcggccgtcagcgagcgcgtcaaggcgctcgagccgggctttcagctatcgtccgactggatcgcccacatgtttgtcagtcgctcctccaatgcgcgagctccatgtcgttgttccatgtgctgacttgcagctcgccgccctgcagatggactcgatggtcgacgtctttatgccgctcatcgactttatcgaggaggaggccgacctgattgactcgcagatcatccaccacgacggccagatcgagtcgccgctcgccaagctcgccgacgccgaagacgccttcgtcgctgaggagcgtcggcgactcagtcaggaggaggacgagagagaggccgaggaggcggccgcagccgcagcgacggcggacggatcgagcgccagctcggacgagtacatcaagaagcaaagggaggccggtgttgaggcgcacgagctcaagggccgccagccgtcgtcgacaagcgtctcgggacagcctgatcccagcggccggccgccggtactcgcctcgacgggcgcgccgacggtcgatgagtggctccgcagccactttcgctggctcaaggttcgaaagggcgatttcatcggcctccggcggctcgtactggccctctatcctctcatcgcccgccttctcatcattctctctctccatccggcccagcgctatgcccgccggcagcgacgggcggccaagcgcggcccgcgggtcgagccgcacgactttgaccgcaaggcgatgctcaagcacatggtcggcatgcgccggcttgtcaccggtctcaatcgactgctcgtcccgaagctcgaggtcgtcggtcggctcaggaaacgagcggctgacaaccggagcggcgcccggctcgggaccgacgtcggcgaacaaatggcaacctactttggcgacatccagggtgcggatgcccgcttttactcggccctagtcgatcaaagttgaccctgcgtcgcctgcagaccacattctctcgatgcagcagacgctcgcttacggcgagcacgtgctctcgcagtcgcaacaggcctaccttgcccagctcaacgtgacactggcctcgatcaaaaattcgagccagtcgtcgatcctaacgctctcgatcgttacgatcggcgtccttgcaccaaccgtcgtcactggtaagctccctccttgcgccctcagacgacttacgccctcctccgctgataagactaacctgccgcaggccttaactcactcaacgtctaccttccgcacaacggcgacgccgacgccagcccgccgcccaaggcgccgcacattctctttggcatcattgccggcgtcgtcatcctctttctcatcgcctttgtcttgctcgtccgctactggaagcgctcggccaagcgccgtttccgcaagaagcgcgaggccttctattgagcgcctggccatgcctgccgacgtcctttctcctccggccttcttcttgccgcatctctccccatcgcccattgactctctttgtagcctccttgacacccgtccgcttagcatcgcatcttttcttcccccctggcataccttctccttccaccccctctctcgcacccctctctcgcacccgtggacgacccccccatagactattgcactctgctcggaatgaccatcttgacgaccaaagcaaacggacggcccggatgggtacaaagagagggacggggcgaacaagctgatcaaacgagtgacagggcgaaggacgggatgggcccgcggcagatagcagaggcagcgagagatggaagattgacggccaaagccgacgggcagtaagggggataaagcgtctacttgacgagctcgacctgggagccttggagcttgcggtcgtcccacgagacgtcgtccatcccgtcggcgtcctggtcgtacgtgttgctccggccgcctgccttggcagccgtcgccgacgaatcggtatagaggacggccggcgttcggacagtgaagtcgtgctcttcgcggtcggcctggatgacgactgagcggtcaacccggacgccgccgttgcgcgacttaaggccaaactccccggcgcgggaggcggcgtgctcggggtcctcggcagggagcgtccggttttcgagccgggtgttctgacggagtggggcaggaggtcagcgccaggtgtggtaaatattggacagaggacgagagcgcacaaggtgaaggacctgagtgattgtgtagacgcggcctggcgggaagatgaaagggtccgtcagggtgtgcgaaaagggtctgaaggcaagacgtctgagcgcaccgagcaccattgagaacatcgtgccggtctgcaagcgagagagtgaaggtcggtcgtcagggacggcgctggatcggccagcgacagcagacgtacatgggtgtcgggccgggtgacaaagagaatgagcgtcaggagcgaaaggacggcggcgaccgagccggtcgagacgacgttcagggccgcccgctggaagcggttctcagtatgggcgatcgtcgtccggttcgtctggtgataccagagcgcggcggcaatcaggacgtcgctaccgacccggacgccggcccagatgatcgactgcgaacgcatcggaaggacagagatgggtcagtcaaaggcgcaggtcgaagaggaagcggcccgacgcccccaaaagtgctcgtccttctggtagttagcaagggcatgggtgcagacgcagccaacgacgaagccagtcgcgacgacgggcgcgacaaagatcgaggtgtgccagtaatgcgagaggtcgcggatccgaccgagcaggacgaggtggcaggcgagggccgagatggacgaggtgatctggcgagaccgagcgaggaacgacaagtcagcgaggccaggtgagttgctggagcgatagagagaccgacacagtaggctggaatgggccacgcgtagccggcggcgtacgtagcgtcggcaaagtgtgtgatcagaaacagccaggacatgatcataatcgagatcgtgcctgcgtggaggcaagggggataggtaaggtcagccctcgacgaagacttgcacgagaggcagacaagcaggagggcgcacagatcacgtcggccaaaagggcgacgatgacgccgatccgattctgcaggcggtcgcgccggtagaccgagaagtacttgaggatctggcggatctcgaccgcgaggaggaagcctggcgaacagcagaaggtcagcataatgaagctacagaggttaagagagtttcggcctgaccattgatccacgaggccgggaagtagatgccaatcgactgtgaggagagagggcgcaaggaaggaaaagcaaagcaagggacagctgtcagcaaccaagacgagcctacggtcgggatgaggcggggggtatccgcactgcttcgtaaggcatgatggaaggtagaggcagggagcgagagggaagggaaggagaagccgagaaggaggctggctggcgaggggagggaggtcgccgagggaagaagtggagcatcccgcgctcgccctgcctcttgaggaatcgccagagggctgcctccctttgattgccctgtcactgaggcgcttggatcggcccttgaaagggcggaggcgccacgagggcggggccgagtggccgagcgaagggatgaaaggcacctaaaaggggccgccacgcgagcggtcgatgaaaggggaggcctgtcggtcggtcactcgattgggtaaaggcagcaaactcgggatcaccgcaccgcgcatatctggcagcagagtacgaggcgacaggtcatgccgatcaaaggctggattggagggagtgagggtgaaagagtagagtcggccgtcggtcgccgctgcctttgctgcgcgctgcggcccctgcttcacctcgtgtgaccccccttctagtcgagttgatccacactcgctgatcaggaagtgatttgggtgacaatgtcccattctatgcgagcgtgcaggagtcgcccttttcccccttccgatctacttgagctctttccgcttgccatcctcccagacctcgctccctccaccgacctcaagcaggtgccagtcgacctcgacgccctccgccctaaacgtctcccggacgctttcggcaatgcccgagaagttgtcgacggcgagggcgagaatcgtcggtccagctcccgagaggcagatgccgagcaggcccgggtgagtcgaaggcgtgtgcgaggagaggacggtcgggaggccagggatctgcgcgcacaaagaggaggcggacaaagcaagacgtcagcccctgaagagtcgagaaagccgaagagcgatggcgggccgggctgacgctcgcggccacctctgcgcagcccctcggaaagaaagtggacggcacgtacgagcacgttgcggtagggctggtgaatccggtccttcatcgcctcgtagatgaggtcggcgtcgggcggcgactggccgagggcggtcgtcaggacagccagccgctggaggttgaacacctggtggtcgaggaagacgcgcagagcgagggtcaggaaggaagcctagagtgcgttcggcgtgagccgcacgaagcgtgcgctcgggagcgagggcagggatgcgcaccatgtccttgcgggtgtacgcctcgggcaggacgccccgggccttggccgtgctgagctcaaagcgggggacgatggcgatcgccttgatctccttcgcccagccaaagcggacaaagtggccgatacccctcggcgggatgggcgggtcgagcccccagtctgggccggcgtcggccgggtactctggcaggacctcggcgagcgggacctcggccgccgacgtctcgagcggcgagagctcgcgcaggtacgagccgacaaagccgccgacgagcgcggcagagacgttgtccgggtgccgctcgaccatcagggcaaagtcgagcagccgactgagcgggaggtcgaggtcaccgaggagcgagccgaggaggacgccagcgataacggccgcaccagatgagccgagcccgcggccgaacgggacaccgttgtcgacggcgacgtgcaggttcggggggagcgacttgatgccgtgcgccctgaggacgtaaagcgccgtccgggtgatgaggttcttgaagggtgagagcggcacgccggccgctccctcaccggtgtaggcgagcgtcgtctcctcggcgttggacctgggggagcgccgagcgatgtagtgtaagcgacccgagcatcggtttccccataaaagcccgttcatcggcagcggcacccacggacgtacgggttgatcgagacgtcgaggacgacgtgcaggctgagcgagaggccgacaacgtcgaagccggggccgatgttggccgaggtcgcagggaccttgatctggaagcggcgcggcgcggtcgggcacgcacggctactgctgctgctgctgctagcgacggagtcagacatggcgagtggtcagagtcggctgagaaggagagtacttgaagttgagtcgcgccttcggagggagcgcggcggctcgaagccaagcgccctagacgcggaggcggccgacggtctcgaggctgacttgcatttgcgcttctcccgccctggaccggccgtgctggctgcctcctcgtgctcagtcgatctcgacggctcgacctgctcctcacgctcactctctcatcctccttcctcccttcctcgttcgcctcgaccgtctgccccatcatgtccggccgtaaccagcgtgtgatggtccagcccatcaacatcatcttcaaacacctccagtcggtgcgaccgcctttccctcgcacctccctctgctcgcctcctggagtcgagctgcagaagcgcgttgcctccgtcgtcgcgcaaacgacctgctcattgatttgggctcgtccgccgtcgctggcgagtgcaagtccggctcaagcacggcgtcgcatcgcacggcggctcgggcgagccagaggcagctctgcccaacgcttgcgccgaagccgagccgcgagccttgacggactacccgtccctcaatgctgaccctgctcgtccttgcctcttcgcccatctacagaaatcgacagtccaggtgtggctctacgacaacacgtcggtccggatggagggcgtcatcgtcgtacgtccttccctctcgtcgtccttttggctcgcgacgggtgaattggcccgcgcgacatcggtcgctcacaccccggtcgagctcagtagcacgggtgctgcgctgaagctcgcttctcgggcggacgggtgggccttggaaagaggaggcagaggtgcctggccctcctcttgtccggcgtcggggctcagtgcgctggcgcaggcacagggtggcacctggcgacacgggcctgtgtcaagcgcgcccgcctctcgagagcagcttgaggcgccgacggctggatggctcgtcgattagcccaggctgcggtcgggaccagctcctaaggggaagacaggctgaagacgcatggacgacgagctagggcgaggttcgacatcagagagagcgggctgccacgcgcggaggatgccctcaagcacgagcacggtgctgacatggctgtcccccatctctcctccttcgctcgaccttcactctcgatccggcagggctttgacgagttcatgaacgtcgtcctcgaccaggcggccgaggttgccgtcaagggcgagacacggactgagctcggtgcgtcccagttcgccttctccgacactggcagacgacgtctgttgggcggatcgagggcgcacaagctaacgcgtacctttgctatccttctttcaggccggatcctcctcaagggcgacaacattacgctcatccagcccatcgtcagcgcatagagagcgagcagaccttctctcgccgggtctcctctctccccgatctctgctgcccctcctcgacatgaccgtcgctcgccaaccttctcaaaagggcacgatcgcctcacactctccctttgcacctctacgcccgaaggggggctcgtgccgtccttgtcaaccctcttcgaccccggaacgcgccttcagggcgaacgtctcccgtcatccatgtgccaacagcctctcttatgaaaaggaaaacaaaaactcgtggatccagcctcgcgcctcggcagcctggggggagtcgacgagtgccggccgacaacgaggcggtcgaccaggcgcccgacgagctcgtccatgccggagccgtcggaaggtcgggtgcttgttgtgagaggcctaaggagatcttgcctggcctcgacaatgatgggctgcttggtcggctcgagatccacctgaagggcaaagagagtcaggaccgacgggttaccggcgcgcaatgctgggctggctgggctgagcagctcgaggtcagcccgcccgccaaggcccgggcgtccgacctcgcctcgcttccgatagtcgtcgagctgggcgagcatacgagcatgctagccaggaagtgatgagcacggcctcttctccggtgtgcgggacagggccaagggtgaggccgttcagcctgggccagcatcaggcagctcgaggtcgccgtcgtcgcggtcgaccgacacaggacgctttgacgacagcgacgacgcagcgacaacgcgatcccccccgaacccgccaccgtccccagcgagggtggaagggagggtcacgtcgtcagcacgcccgaccgcccatcaagcagccttcccctcgacccctctctcctcccctcggccagcccggccagtagctcggcagccggcagctcagctccaacagcaactcctcttcccgccgttcgaccagccctccgaggccgaggagaggcctgctgctgcatccccgagcggccaaggtgcgtcccctctcgcgccgcacccgcagccgctcggccgacctacaccagctcgtaccagcagctggcaggcgacacgcccatccaagccctctggtcgctaaccaggccagctcgaccgccgtcagagccgtcagacgaggtcgcgaccgactcatcgctggccagtcgatgggtgagcccggctaccggcgtgcgagtcccagtgctgatgctgctgacttgcttgacgtcgcttgtgtctgcgtgggaagggtacgagaatgaagaggaaagtcggtcagtgctgatctcgtgcgtacggccgccgtctcccccactcgacgcacacgcatgcagcccctcgtcctccaggacgcgctgatgcgcatgctcacctcgcagaaaggctgaccctcgctcgcactatgagcgcgcctcaactgcaagggccgactcgtgtcgccgaccagtggccaggggactacatgcggcgtgtgccgcggcaagcgcgctcggaccggcgctgatacagctgaccgcatgcgcctgccccctgcgcatgagcaagagcgtggcaaagtgcgcggagagagacagaaaaaaggaggaacgcacgactaggcgagattgcggcgaagggcgagcggccggccggttggccggtatgcgcacgggcggtccgtgcgtacgacgcccgccaggctgcaggtgtcgacagtgacggccgcagactagagctgaccgccgagcgtcgccgaccgtcgtctgcagcgccagtcgagcgagtccgagtacgtctgatccgtcgatggaggggcagcgttgggtgaagaggaaggttggaagcggcgggtggtcgggcgcctcgctacgcacgacgtgcctggcggtgtcggcgacgcatccagggccgctctgcagatctcgtcgaccgaccgagcacgcgttgacgctcgagcgattgcttttctctgcctgacgttgctcgcggtcctaccaggtcgaccggcaggctggccggttggccgtgctcggtagcaagcagcagctggctggcggttgaccgaggcaagcggagatgtcgcgccggcagagaggggctgcggacgggatgagtcggtcggccggccagttgtcggtcgcctcttgctcggacaggactgctgcacggcctcgacgggtagctggcaggtgggaagcagaaggcgggtggcgggacggctagcgaacggcgggcgtctcgtcgtactgcggccagggcgggaggcgcgggcgctgcgcaggtcgccggcctgcagcaccagcagcagcaccagcagcagacaagctccttctcgtcctgaccagtcctccttcgcacggccatctcgctctccttgaagaacctcgcccggctcggatctcagccagctgctcgtctccgtacgctcgcccgcttagctcctcccagcgagctccttggcgtcgcccgcctcccgccgactccttctgtccgacatggcctccgcccagccatcctcctcctcggcacccatctcgcaccagccagcatcgagagagctaccggtgctgacagcggcgtcgtggggccggccgcggagtgttcctggcggccatcgcgaggcggtcaactgccttgactggagtctcgacggccggaagctcgcgagctcatcggtcgccggcggcgacaagggcatccggatctgggactcgggcgcttcgggaaccacggtgcgtcctgccaaaacaactaccgcttgtcgctggtgctgaccaacgctgtccttctatctgcttccagctcgacgttcgtaactcgtttgccctgacgacgccgcacgcgtccggcgcgcagatcacccgcctccgctggaacccggcgcacctctcggagctcgtgtccgccggcggcaagagcgatccgcaggtctgcttctgggacgtccgaggtgcgcgcctgtcattgctgtggagccgcctgtcctgactcggaggctgacgctgagcactgcactcgcttgctcgtcgtctccagcgagctcgacgaagccgctgacgagcctgacgctggctgtcgggccctgcgagatcgcgcatcacccagacggcggcatcctggctgtttccgaccttaaggaaaaggttaccttctttgaccgacgaatggtcacggtcgaccggcccgtcgcggtggcggcagctacggcgctaacgacgactgcggcgaccgcggacgctgggccgagcacggtcgaccaggccagctggcaggccaacggtagtgtcatcgcagccaacccttcaaaggacctcgtgcgtcgatggccatttgacactcacgtggggcgtgtcatgctgaaccgctcgcttgcgccatgccgccagacctttgacatctcgttcaccgcggccggagaccacttctgcatcgcaaacagcggcggcaaggtgctcgtccgtccctgggcttcgcttctcgtaggatcctcctcctccggtccgtcgagtatggacgtcgacgatgccaagccggcggcccagcccagcaaaccgtgggagatcgacgcccagatgggctcgtgcaacgccttgcgcttcacgcgcgacgggcgctacatggcgaccgccgggacggatgcgatcgtcaacctctggtcgaccgacgagtttatcgcgctcaagtcgtttggcgatatgaggtgcgtgcgaaccacgcgagctgttggcacctctttccgagtgctaacttctcccccgcctgtcacctgtagcggcgagataaagcagctcgccttctcaaactctggcgagcttctcgcagccggtggggaggagtcgtcgatctaccttgtacgccaacctgcctggcatcgcccctcttctgtgcaatactgactcctcctgctaccggcagttctcgacaacggacgagaccttcctcaccaagattgccacgggcgggccgacgatctcgatggcctggtcgccgaagcacgacgtacgtctctcgccgctcccgccttcgaaactgcctgctgatcaggtcgattccccttcagacgcttgcgtactcgtcgaccgaccgcgcaaacgccggcgcgatcaaccttctgacgaccgcgacaacctcttgatgcctttgcgacgacagacgatacgcgagggtagcattggagaaatttggaaccgacaggacagggcgagtgcgcggacgatgcagccagtgatcgacggacaggcgagtggaaggcggtcacagaggcaggaagacgagaaagaacaagttgccgggagacgaaagcacagaagaggagggcggaggagaagggggaggagaccaaggagccaaagtagtgtagccaagacgaggcaggtctgagaacgaagctggcctcatcgaagaagctttggcctgcaagagtcggtaaccgtcagcaactgaaacgatctggcaaagcgtgcgcgtcgacgaaccggtttgaggcggccgccgcggcagacgtgctgtggccagccttgcgcgaccgatcggcatgagcgatcgccagcggcttgacgcacaggccgctcgatagattgtccggccgctcctcgacgacggcgttcatctgccgtgactggccgagcacgtcttgccgggagcctggtcggccgtaggacgagtgagccgtttcgggccggaccgtgccgcaaaactgcgacgccgacgagctcggccgataggcagacagggaggaggccgcgcgcggtgggaccgcctgctcgagcggaaccttgggctggcctcgaatgcggcccacgtagccgaggccagcacggggcagcggcgttggcgagtggtatgagaaggcctcgctgccgccagacgcggttgaagccacggtaagggctgaggcttccgaggcactgcgatgcaggcgcagcggcatccggtactcggagtgcggcgtgccggtctgtaagtttgggatctccgacgggtgagagaatggaggcgagcatggcggtgtcggctcctcgacgacaaccggttggacgtcgtccgaaacgtccccttcgagcgtgccgccgccgtcgcatccgccgagcgactcgtcctggatctggtagtcgacgtcatcgaccgtcgacgagccgacgagttcggcctggagctgagcgagtttctcgccgaggtcggttgcgtcgctgaaggccaacgaggcatgcgacagcggccgtgccgtcaaaatgcgaagcaggtcgcgctcgatatcgttgtcggccattgcagactcgccttccttgttgccgctctcggaggaggctggtccgaacgtgcccttggaccgccgggtgacaatcgtttccgggtcggaagcggccgggtgctcgacaggattcgccaccgagacgggggtcgataggccggacgcagggcgggtgttgccctttgctgacccgtcgtcttcgacatcttcctcggcgacgtcgccgagctcggcagcgctgccgtccgactcgtcaaaggtccgcctgccgccgactgtggcaaacgagtcgccgaggaaaaggctgagatcgctgaaagcgatcggcggcccgtcggcagcgaggcgtccaaactcgtcgaggacctctgccgaccacgtctcgtcgatgtcgagcgcgtgaatggccgggagtgacatgtacgccttgtgcttaggccggaggtcgccacttggccggctgcggtgccgcgcgctctgagagagccgggagggtgtcgacgcgacgaccgagggcgagtcgaagaagcggttgaggaacgaggccgaccgcatctcgactgacgtcgaccggccgtgagatggcgtcggcgcctgagccccaccgcgcgagcgcgccaaggtcgaaggcggcgtgttggagggctcgcgctggaacggcagattctccttgtcgtacgagctcaggcggcggatgaccaaccgagcggcgttgctggctgagttggcaaagccggttgaccgggtcgacgccggctggtcgccatgagtgacctcgacctccttgccaatgcgaatggtggggacgagccgtggcaggaggccggccgtcatccagtcgatcgagtaagacgacgtcttggtgcccatcttgtcttccatggagaccgcaggcgcagcgccaaactcgccagtgtcgaacgccgtcggcgacggcggcaggtagacgaggcgcgccatgtcgccgctgacccgcgtcgcccgctgggcagtcgagacggtcgctttgtggaccgagccgaagaagctgtgcgagcggtggatgtcctcggcatgcgccgtgtgctcggcctcgtcatgctggtaggatgccgacaggttggaacgctgggatgaggcgacggacggcgtcggtgacggagcgcggctcgtcgtcgaccggcaggcggcgggagggaaggtgagctcggagggcgagtggatcggcagctgctgctggagcgtcgggtgcgggctcagcatgctgacgacgcgcgaaagacgcgaggccggccgagagacgtggccgttgtcgtgcctgggtcaggggccaagcgacacgtcagctatgagaccatggaaagaaaatggtgagcaaacgcaccagtagtcggccaggttgccctcttcgttcggggacaggcaccggccctgcatgagtccagagccagacgcagcactagtcaagctcgagctcgaccgattagcggcgagcgcgtcgaccaggtgcagaggccgcagctcgctcttgcgcttggcagacgaagccgacttgacgggcgtgcttccttggactacgatggccggctggacggcgcacaagcgagcacccgacgtcgaggtctgcgtgtcatttacgaaggtcgttgtccgaggaatgtgcacgagagcagttttgaaggctgaggtgcgaaggacgagggtgaaaaagaagtagaagggcgacgagagggtgagggacaggaggaacgtgatggtcgaggcgacattcgcctgtgtgccgggccgagtgagcgagtcgatgacgataggcatggcgagagcctgcgagcaaaagcgccggtcggtcagcagatgtgtcgcaatcggccaagaagcgaaaacgacgtacgaagacgatccaagcggcgataatcatggcaccgaagagcgcgacgtccttgcgtgccatgcgcaccgtctgcgtcgcatcggcctggtgaccgaggtcgaccgagctgaacgccttctcgcggtcggacacccgtttggggccgctgctggtcgtcgtggctgtcccgggagccgggtacgcctggtagtgggcgtcgctcgagctggcgaacgtcgaagctagacctggcaggatccggaccgtcagcccaccgtcgccagccgtcgtcgtcgtccagcggctcgaggtcgagggtcgagtcggatcgtgatcctcggtcgaagaaggcggggtcgggggcagagggatggtcggcggtggcgaaaggggtgtgccggggtgagcgcggcccggcccaatgctgactcggtggacgataggcgtggcggcgaagggatccgagccgtgcaagaggggcgaaggcggcgcggtcgtcgacggataagagaagggcgacatggtcggctgcggtcctgacggctccgacagccacgagtctggcgtctggtcgacgatggggtgcgaggcgtgtgtcgtgtcgaacgaccactccggcaagggcgagcctgagcgggacggcgaggtgagccacgatttgggccgactggcgagcgagtgcgtcccatcggatgaaggcgttggcgatcggagcagatggtcgtactgcgagttgcggggcagcgacaggtcaaacggcggcagcgtttcgaccgagtggtcgagcgacgagaccctgcagttcgcgagaagcatcgcggtcagctctgacgactaggtgggcactgacagtgaaggacagaatcgggcgcaccagcttgcagactctgcccagccgggcgggcgccgggtgtcagacgacttttccctgctggcctcgaggtggtaggcgacagcgaccggcacctggacggcaccggcggccgagaagaggagggagactgccgcggcagtcgcagccagcataaggaccagtccagcaacgagagcgacgccgtagacggccgagaggtcaaccgaggcgacgccagcgaagagacaggcaaaaagcgcgacgacagccgcggccgcgcctagcgagacgagcgccgccttgcgcgcctgccgttcctcgcggatcggcgagctactggcggtggacgaggtccgagcgttggcgaagagataggcgaggacggccagccaggcgacctgtcgactgacgaggacgaggcccatgcgggtaccctcgccgacgctatcaatcgagccagcggcaacagcccgaccgtcacgcgcccgcgaccaaagcaggagcccctgccagaggccgagaacgagcacaccaaggtcgacagcggcgaggcagacggcaatcttgcgggccttggcggcgccggccgatggttgcgaggtcgggcggggcggcagtgaggggtagaaggaccgcggaagcgggcgcaagggattgagcagcttccacggcgagaagcgagatacgagcggcaggagcagcaaggccaaggtcgagcactgcaagaggaagtggcgaggtcagcggaagtgggcgctggtcggcagcccaaagcggttgggtgggggtggaggacgcacagctgagagcagggacaggaggaggaggacgagcaacggtggagcgacgagcatcgttgagcaggcgaagcgccgacaggaaaggcgaccttgagttgatgacgaaggcggcttgttagtcttgggtttgacttgcgggcgagggggggggggtcggacgagtgcgtgttggcgggcggacgacgagatcgacgcgcctgctttctttttcctctctgcgcagcgtcctccggtcagctgaggtcgatcagccaacagggggaacgttgagtgaggcaggggcgagtggccgagtgaaggcgaggagcgtcatcgtgcggacggcgcacaggggcgcgtgctgctgctgcatgggtggtcgcccgccctcctaaatctcggctgctcgcgcgccagagaaggtcgttcctctatcagtcccgatgcgtccgagacgatggagcagaccgttagtgacgagagaggagagcgagatgggtcgacaggaggagagcgagcgagcgaggcaacgacaggcaggcgggccgctgcgcagatgccgtttttccgcgggcgagccttgtctccctgcgccaggagctcacgacctcggagtcaccctaccacacccctcacccagcagcaacgatgtccgccaacatgtcgaccgagccgacgatggaggaggagaacatcttctccggcctcaagaagaagaagaaggtcaagaaggttgaggaggagccctcgccggcgccgacgcctgccgacggcgacgacgacgccgccgcagacgaggagggcggcgacatgttcgccgacctcaagaagaagtgcgtccctctttctcgatctgggctgctgggctgccagctcgggcttgctacgaccagcctgcagtccttgcttgctcgagggacgtggcgagcggtgctgtagcgagcgcccgcggggccggacctcgtccaccatctgacgctgcctttcgagctcatgctgacccccttgagctgcgtctcgcctgcctcgcccgtctcgcaggaagaaaaagaagaacgacaaggtcgacctgctcggaaacgtgcgtcaccttgctccctgaaggcagagagtcgcagcgtgctgacgatatccccccccctctctcggctctgtgcttttcgcctccaccctcggccctcgcctcgtaggacgccccggaggaggtccctgaggagacggctgcggccgctgctgaggagacgacggcgccagacgacttctcggacctcaagaagaagaagaagaagtcgtcgaagaaggcggcgtttgacctcgaggcgttcgagcgcgagctcgccgaggacggcccggcggctgccggcgcgggcggtctcgagggcggcgacgacgacgcggctgtcgagggcaccgtgcccgagtatggcgagaacgagctcggcgagaacgtctttggcggtgggggagccggggccgacatccccgaggacgccgacgactcggccatgccgtgggccggcagcgaccgcgagtacacgtacgacgaggtgcgtcccgcccctttgcttgcactgccctcccctccccctcccctctccccttgtgcaggatctgaccagcacactgtccctccctttcgcgccgcagctcctttcgcgcgtcttccggatcctccgctcgcagaaccctgagctcgctggcgagcgccgccggtacacgatcgcgccaccgcagatgctccgggacggcaacaaaaagacgattttcgccaacctggccgacatctgcaagcggatgcaccggtcggacgagcacgtcattgccttcctctatgccgagctcggcacgtcgggctcggttgacggcagccaccggctcatcatcaagggccgctacacgcagaagcacatggagaacgtcctgcggcgatacattggtccgtcccgccgccttctcgttctgctggtagcctcgcgctgaattatccgtccgccccgcccctttcccagttgagtacgtcacctgcgcgacctgcaagtcgccagacacgctgctctcaaaggagaaccgcatcttcttcatgaactgccagtcgtgcggcagtcgtacgtccctgcctcgctgttgcatcgctcgtccacagcccgctgactccgtcgtctttcttcataggccggtcggtcgccgctatcaagtcgggattccaggcccaagtcggccggcgggcgaagaaggcggcatgaggagcggaagcaaagtcatgagcctctctgtagccagcatcgtcctccgtctctggtagccagtctaaatcgcactgaggcgcgactgctcaggcactcaaaatctcttcagatagattcaggcctagaagaagcagacgtcaaagatgaggtctctctcgcggttgcgcttgacggcgacgatgcgctgctcgtcgatgcagaggccggtcaggtgctcgggttggttcgggatgccctcttgggcgagcacggccgtctcgcgctcgacgtagggcaggtccttgccggtcgacagcggctgcatccagacgtcggtcgccggcgtatagtttggcttgctgatgagccggcccttgtcggtcgccgactcgctcagctcgggcaggtccgtcggcttgtagaggatcgccggcgtcggcgcccgcggctcggcgccctggctccgcaggcgggcgaccgagtagggcgaaaagtcgaggacgcgcgcccggacgtcgatctgacggccaagggcattcggtgcgtcgacctcctggcagacggcatgcacgaacttgctctggtagacgtagagcacccacgattgctcgagtctgggcgagcgcgagggagaccgtcagcgtctgcgggcgaggcgtgcagtcggggcgacgtacggaatgtcggccagcagccggcacttgtcgctccaatccatccagtcgcggtgcagcggcttgacgcccaagccgttgtccgacgtctcgtcggaccagtcgctgtcgttgtcgtccgtctcggcctcatcggcctcatcggcggcaggctgaggttggccggccatggcgttgtcaaggacgtggtcgagcaaccgagcctgctcggtccgagggccgaggacgaggtcatgcagcgtcggggtagaggttcctgtccccccgaggttcgggatcgacgtcctctcgcgttcgattgccgccttgcggtgcagctcgggaagcggggggaaatgcttgaggttcttcatcagcgtcgtcttgaggaggaagagcgtgtagcgccgctcggccggcacagctatgacgcagatcggggggatcgaatgtcaacgcgaggcgcggaggcaggcacagcgcttcgtcgtacgtaccccagccgccgtcctggcccggaacgacaaacatcaggtcgaggacgagcagccgctcgcccccgtcagggacgaacattggcgtccggccctcgccctcggcgaacggcggcaggcctggatgcgtgcccggcgccggatcgagtcggaggctcatcatcgccggccggctgtcggcctctggcagctcgtggacggcgaggaggatcgggggcggcacgaagtcgggcgcgctctcggtaggcgtgaagctcgagtcgaaggtctgcaggcggaaagtgttcgtcagtggcgtcgtcctcggctgcttcggacgaggcgcaggaacagacatgcatgttgagaaacatgtcgctcgtctcttcgttgacggtcgctgtcacatagacgtccttggcaaggaatgaaaagctttcgatcacctcatcgagcttggacgattgcgtctggaggggggcagcgcggttcagcgcttggcccgacggcgggtatttcggcaggacagcactcacagcaactctgacgccgcgcttccagtcccagatgcagagcccgccctcgggcatgtggcctcggtggatgctcgcctgaagcgaaacgacattgtccatgacgctgataaacgggctcgtagactccgaaaggacaaacggccactcgaggaccgcctcctttgcctcgggatggggctcgaacgtcgagagcgtgacgagatggatccggtaggagatgcggcggacgttgggcgtcctccgttccggcgacctgacgaacgaatcgaagtgtcagtaacgagcaagccttgcaaagagcgattgcaactcaccaggtctggatgagcacgagcaggtcgtgtgccggatcgctcgtaaagtccttgatcacccagccgggcgtacacgagcgcgacggaacgtcggtcgagccgagcgtcgagggaatcttgtagaacttgagcgtccggcaaggcgactccatgccctggttgagaggatacgcatcgcgccggtcgagagtcagcctttgagtccaagcgtctgccgtcggcgaatcggtgaggtacgcacgagagcgagcactccgcccaggaagtcctgaaggagcagcggcgggcagtgttcgagtcagccccctgtactcggtcaaggactcaagcgaaggacaaacgtagacggttccaccgtcgcccctcttgacgacgacggcctggcgcctgagaggtgtcgaccctgagggtcagcacgggcgcaggccataccaccctcgttcgagggaggcagagcgcgggctacccgcttcagccgacgcaccgcttccattccatcgtccgccagcgctgttgacgctcgctcaggatggcgagccgctcggccgccggagctggtgctatcttggcatcgagcaccgtccagtcctgctggtgcgacgtctgcagctgatatgaatactggacggcctgcgagaggaagagctcgtggagcgccttgcaggtccgcgtcgctgcgagcaacgtgcccggcgtcgggagaagcaagaggattttaatgaggatctcggccggaaggctcgcgaatgcgccctgagccctagagtccatcttgagtcgaggtcgaatgaggcggcgttgcaggtctgagaagggcatggggcaaggcggcgacgacgacaacgatctctttgccgccgacttcgattcggaagcaagttgccctcccctgaacggttcagcccgacgagctggctgctgcacggtcgacggccacctggctctagcacagacgaccctttcgtactcgtctacggcgcccgatgacggtcatcgacgttcccgagctcgctcatcggccgaccgacggtcgacgcaggtccgaaatgccaactcgggaggccgccgcggccgggtcgccttccctcgactgccttggatgctgacatggctgacgccgctctcactacccttgtagatgcggtcgagctgacctggatcccggccggctaccctggctatcgcaggaaggtgaggtcatggatctgacacagctccgaccgcggcgtaaaggccgttccgggcaccgaccgcgcgcaagtctcgccgctcgcctcgtcgtcgcagctgcccgagccggcccggcctagcgacctgccggccccatcaacagcctttcagccatcggccggaagcgccctacctctatcgtctgctgatgcgcagcctgcccatgctgcgagccgagccgagggcatggggaccgagtttgagctggccgggatctcgttgcgcgtctcaaagagtcaggacgcgcccacgcccatctcgccccatcgcttctcctcctccttctcctcctcctcctcctcctcctccgccgccttctccctgcgtcctgctgtcaacacgatgtcgcacctcacacccgtcacatccaacttcaccgagagcgagaaggacttcaagcaagacatcacccacgtcgagcacgcgcagctcgacccgctcgccgaggagggtgatgccgagctcgcccagtacaccgacagctccatcgtacgtccctgtttgctggtagcttaagcggcatgcgacaggcctgccctgctgtctggctgcgaccctgctgggcgtgttgctgcgcgccggtcatcgccggtgctcacccaacgctcgccctccacaggtcatcgacgaggcgaccaacaagcgactactgcgtctcctcaatcggcgcgtgctgccaataatggtggggacctactgcaagttctccctccttctctggtgctgcgatgcgtcactagctgacgctcttcgccacctgcagtctgccagactttcgacaagtgcgtcacggcgttaatttaattccgcacctcgagacgagcctcgcactgatgcctcgactcgctctcatcaggggaaccctcgccttcgcctccattatgggcctgcgcgaggacaacaacctggtcggccagcagtacgctttgctcggcacggtcagtccctcaagactcccttctcccctgaacgccgactgacgcttcgaagcaacaggctctctatcttagctacctcgtctttgagcttccaatgaacctcctccttcagcgcttgcccgttgccaaattcctgtgcgtccattcccttgcgcgactcttgccgccgaccgattctgactgcactgcaacccgcaggtcgacgatcgtctttgtctggggcgtgtctggtgagcgatcacccacgcatcgtctcgcagtccatgcttacagcttgctgacttgctgagcctaacggcctgcaaaccgcagtcttctgccacgctgccggtgagtctgccgccgcctgcagcccaatactcttaatctctcgctgaccgtcgtcgcctgatgtacagcatctaactttgcaggattgttggcgtgtcgattgattttgggcgtgtttgaatctgctgtacagccaacgttgatggtggtacgttgctctgcagtttgaggacgtctgactcgagtcgcctgacgttgtcgggcctcgacatcttcagctcacgacgatgtactaccgcaaggaggaggtgcgcctgccttcaggtcgcagcctgagaaaggacaatagactgatagcgagactacctggcgcgtcagcaacccttgatcctcgccctctggtactcgcagcaaggtacgccgacaccgcagagtctcgcccctggcgcctcggctaacccttccgtcttcttgcccaccttgcaaaacaggctttcagcttattgtgtcaggcttgttgagcttcggactcacccacctcaaaggcggcgcactacggccttggcagggtgcgtgagcgcaagtcaaggcgcgcctgctgcgcaccgtctgcagaacgagctgacctcctcacaccacattttctcacagctctgttcgttttggtcggcgcactcactgtcatctggagtcttgtaatcggcttgtttctgcctgactcgccgatgagggccaaggtgcgtcgcagaccaagcctgctgcgcgcgtccttgagctgatcaggactcctggccgcagtgctggagcgaggaggacaaggtcctgcttgtcgaacgtctccgaatcaacgagaacgctccgcaggtgagctcttgcaggcttccttgacttcctaggcggcggctgactcccgacgagctcccttgaacagaacaaagagttcaagtgggagcaggtccgcgaggccttgaccgacccggtcgtctggattatctggacgatgcagatctccatcttcatccctgtggctggtcttgcatctttcggtaagacttgcacaacgcaaaatgtcacccaagacaccaggactgacgctgagacgcgccctgcctcatcgccagccaacattatcgtccgagacggcctcggcttctccgtccgcaacgcgcaacttctcaacgtcgctcagggtgcgatcagcatctgcatctatgcgtcgagcgcctgggcctcttacaagacgaagcagacggtcctcgtcatgatcgtgtggcttctgcctgctttggccggctcggttgtgctggcaacaattcctgtcaccaagagcaacgctccaggcatgctaattgcgttctacgccgtccaggtgagtctctcaagccgacgcctgaaattgtgtccgctatggctgaccttttccccggtcacagttcgtcatctcgaccggtgtacgtctctctcgctgttccaccgaccgagtgcgcgagtctgcctgaggtcagcggctgactctcgtccgaattccccctgatgcgacgcagaacctcttgtggtccctcatcagccggaacattgctggtcagaccaagaaggtgcgctggcctcctacctctcctcccctcgcaccttcctgaccaaccgccatacttgcagagcgtggtcaacaccggtgccttcttggcctacgcaactggctgcatcatcggtcctcaggtccgtctgttatgaaggacggcaggccgaacccgaactgaccgctgttgacctttacggaccatcttgtgaccaggtcttccaagccaaggccgcgccgcgctacatctcggcctggatcgcccacatcgtcatctacggcgtctacatcctcctggcgatccttcttcgcatcatcctcatgcggcggaacgttctcaagcgtagggcggctaccggcagcgacgacggcgtacgtactgctttccttcgcgtcgcgctcaatccacccaccctgtcatctgaccgttgctccttcttctcttcgtgactcacaggaggacaagctcgaccacagccgagcctttaccgatcagaccgaccggctcaaccccaacttccgctacgtcttctagtctcgacgtggcacccggcgtgctcctcttcatcgtccatcctcggtgtaactctgcctcttccttactcttgtagccatctattttgcccctgtgcctcccttccctcctcctcggttgtattcatctcgcttcgatcgcagtcacggcagttcagcaggacggccgacacctcgacatagcggcttggctgaaggcgggcgtcgccgtcgaggcgcagcagggcaggctgctggctgattgggaaagtaatgggatatggcaggcgaaggagcgcgtgcatgcgagcagctagggagaggtcgagcctagcaagggcaagagtgtagcgatgtcaaaatggccaagcttcctgtagaagaggcgacgtgacgcagtcgagccggcagccgacgacctacaagctcgcgagcttccggccgtcgagactccagtcaaggcagttgaccgcctcgcgatggccgccaggaacactccgcggccggccccacgacgccgctgtcagcaccggtagctctctcgatgctggctggtgcgagatgggtgccgaggaggaggatggctgggcggaggccatgtcggacagaaggagtcggcgggaggcgggcgacgccaaggagctcgctgggaggagctaagcgggcgagcgtacggagacgagcagctggctgagatccgagccgggcgaggttcttcaaggagagcgagatggccgtgcgaaggaggactggtcaggacgagaaggagcttgtctgctgctggtgctgctgctggtgctgcaggccggcgacctgcgcagcgcccgcgcctcccgccctggccgcagtacgacgagacgcccgccgttcgctagccgtcccgccacccgccttctgcttcccacctgccagctacccgtcgaggccgtgcagcagtcctgtccgagcaagaggcgaccgacaactggccggccgaccgactcatcccgtccgcagcccctctctgccggcgcgacatctccgcttgcctcggtcaaccgccagccagctgctgcttgctaccgagcacggccaaccggccagcctgccggtcgacctggtaggaccgcgagcaacgtcaggcagagaaaagcaatcgctcgagcgtcaacgcgtgctcggtcggtcgacgagatctgcagagcggccctggatgcgtcgccgacaccgccaggcacgtcgtgcgtagcgaggcgcccgaccacccgccgcttccaaccttcctcttcacccaacgctgcccctccatcgacggatcagacgtactcggactcgctcgactggcgctgcagacgacggtcggcgacgctcggcggtcagctctagtctgcggccgtcactgtcgacacctgcagcctggcgggcgtcgtacgcacggaccgcccgtgcgcataccggccaaccggccggccgctcgcccttcgccgcaatctcgcctagtcgtgcgttcctccttttttctgtctctctccgcgcactttgccacgctcttgctcatgcgcagggggcaggcgcatgcggtcagctgtatcagcgccggtccgagcgcgcttgccgcggcacacgccgcatgtagtcccctggccactggtcggcgacacgagtcggcccttgcagttgaggcgcgctcatagtgcgagcgagggtcagcctttctgcgaggtgagcatgcgcatcagcgcgtcctggaggacgaggggctgcatgcgtgtgcgtcgagtgggggagacggcggccgtacgcacgagatcagcactgaccgactttcctcttcattctcgtacccttcccacgcagacacaagcgacgtcaagcaagtcagcagcatcagcactgggactcgcacgccggtagccgggctcacccatcgactggccagcgatgagtcggtcgcgacctcgtctgacggctctgacggcggtcgagctggcctggttagcgaccagagggcttggatgggcgtgtcgcctgccagctgctggtacgagctggtgtaggtcggccgagcggctgcgggtgcggcgcgagaggggacgcaccttggccgctcggggatgcagcagcaggcctctcctcggcctcggagggctggtcgaacggcgggaagaggagttgctgttggagctgagctgccggctgccgagctactggccgggctggccgaggggaggagagaggggtcgaggggaaggctgcttgatgggcggtcgggcgtgctgacgacgtgaccctcccttccaccctcgaggaggatgtacttgagcgagcggagctgggggggcgggggcgcaaggtgtgtcagtcgttggtcctgaccgagtagatggaggcgctcttctcgcttaagaaggcaggtacggacgaggaagaaggcgttggcggcgacgacgtagagaaagacggaccaccagacgagccggccgggcgaaagcaggtcgacgagcaggcagcagatgatgctgtcaagaggtcggagatgaccaaagtgccagtcagccagtggatctcacacaacgaacgacgaccgccgccgccgccgccaaggtgaggggcaataggagactgagacgcacccgacaaacttgtagccgccataaaacccaacctcccacgcgcccgccccgccgcccttgacgtcgagcaggtacgtcccgagcttgagcgccataaactcgagcaggacgacgccgagggccttgctcgcggtcaggccgagcacttcggggtgaaagcgcgactggaggccggtgtggagggccgagaggaggatgtaggtgatgatggacatggctgcgggtaggcgcgatgtcagctgaaggggagcgggtggcggagagtcggagtgcgtactcggaatgtagaggtcgggcgcgttgatgtcctcgcgcggcgacgcccaaccctcgccctgaccctcagcgttgcgccggacctgcaagagcaagcaacagaggtcagtctgcgccgggagacgacaagggagagcggcctccgaacgcaccgtcctcgcccaggtccgctggcgccatggccaaagcaggacgccgagcttgcgcaggacgtaggcgtttgagacggcgaacgagtgcttgagcagcggcatcggcagatggcgcgtgaactgccagaggacaaagcggtgcgggggtcagcgacattctcgcgaaacgtcagtccgggggcgtgcgggacggcagggacggaccgtctgctcgacgtagttctgcccggcaccgagcacgtggctcccgaattgcaggcccatctgcgccgtcgcatcattcatcccagccgcgcccattgcagacgccattgggttccaaccgcgctgctgctgctgctgctgctgctgctgctgttgcgggtaagctgaggaggaggtcgaggaggaggccatcgagccgaggggctggtggtgatgcgatggctgggcaggagcgtagtagccgccgcctgacgaaatggagagttgcgacgaagcagcggcggcggacggcaagaggggtcgcagggcgacaggcggcagcggagccgagagggcaggcagggaagcgaggtcgagctgtcagtctctccgaactgccggcctgctgagcggagaaacgcaccctgcatgcctgcgtagccctgctgcatctgctgcggctgctgctgctgctgttgagcgccaaagccgccctggccgccgaggttcggcggcgggctcgagtaccgctcgtacgaaggctgctgctggaggtggccgtacggcgagctgctgccggccgggtcggttgttgctgggctcgcgttggacggcgtccgcggaggctcgggcgggtggaagggcgccctcgggatcgggtgctggagcggcggcggcgaggcagcgtacgacatcgtgcgaaggttgtctgaaaggagatgtctgtcggagggcgacctccgtagagatggctcgctgcagggccgcgatgcactcgagcgccgagaagcctcccgacctgcatcgctcgccttgcttcggctcaagacgacgcctccccttgctcctcctcctcaacccagcagctcagccctcctgatccttctccttcgtcctcatgtccttccttctgaggtcgctccggtcagccgttggcctggcatcggcactcccgtcctcatcgtcggccgccgccgtcggctcgtcgtcgcgctcggctggcctcccgagctccgcctcgcagcagcggcacgtctcgctcgtctcggccggcaacgtccggtcaaccaagggtgctcgcaaggcggtcagtccccctgttctgtaccattcggctcgtaagagagcccgtactgggcttggtagcgacatgctcttgccatcgtcaatgcctgcagcagctctcatcgaccgcgctcgagctccctccgagccgccaagtgcctcgccgtctggcctctaggcactgacgagcttccatcctgattccttttgcatcgcttatgcgccgcttcttcgtcacgctacgtcgccgatgtcgttcattctttcggtcctcacgtctgcacctccgcctgccgctcgccgccggtccctccgcccttcgacttcgccgtctccagagaacccgcgtcggtcgcggtgagggtgcgcaggagggagagggaaaaggtcggggaacaaagggtcagggcgcgcgtgccggccggggcacgacgagagcgttcgagggcggccagacgccgctgacgcgcatgtacccgaagcggggcttcttcaacttgtgcgtcctgcgttcggcggtccggctcgagcttcaagtgctgatcgtgctcccacgtccctttctgcgcatcgcagcaagcgcaagcagtacgagccgatttcgctcggcacgctgcaagaatacattgacctccgccggctcgacccgaccgagcccatcacggtcgagcacatcttcaaggctggcgtcgtcacccactttaagcgcaccaacggctggaagctcctggcgtcgggcgtcagtcgccttcctcctgactctcgtcctcttagccctgcgctcggggctgacctgctcgtactctggcctgccctcttcagtttgagaagctcaagcagccgttgacgctcgtcccgcatcgcgcgtcaaccgctgcgatcgccgccgtcgaggcgtccggcggaaccgtcaccgccgtctaccacaaccggctctcgttccgccaggcgatccacccggagaagtaccagggccacctgcgcgtgcgcgaggcgctgccgatgaagaagcgcgacatcctctactactcatcttggtatgtcgcccttctctatgtggctcgccttttcacctatgctgaccttactccggctgctgctcctcagggacaagcgcggttacctcgctcagcggccggccgactttgacccgctcgccgaggccgcgcgggtgctcgtccagcccgagccgcggacgatgcacgagacgactggcgcctactcaaccggcaagggcaagtaggcgggaagcgagatcggcgaggtgccggcgggcaggctcattgagagctcgctcggccgcgatcggcagggatgcgcatgatcttgtccctttcgacccgctcgtgtcgccacggctgatacgagacagaagcacagccacagtgagcgagagtgtgtcatgcttgatgaggccgaggaccagccgattacgccccttccaggcccgctcgttgccgccctttcgtttgcgtcgaccgtcttccgtcgccgtccattccgttatcaccagccgcccgggctcagtcgctgtcctccaaggggtctggcgccatcgattcgagaccttcagtcagatggtgacagcatgagcaggcaaagatgaaagggacaaaggccccgctacgtcccaaacggcatcatcccttcgtcctcccagtctgactcctcgtcgtccgagttggtcagctcgtgaaaggccaggatgaagcagtgtctcttcttgatcatccagttgtccatcgagaacatatctgcctgggttgcatctcgcccgtattgcttgaggtcggcaaaaacgtaggaactggagttgaggagctcgagctcgctatcatactcgacttcgaggagcgactgatgctggcaacccaggacttgtagacgtctgacgccagtcgggttctcgaccgttctcaatgtcggaccggcctcgccattgatgaagcgggcgtagagtttcgaggtcgcaggctgcgtagcgtgctcgagttgagccggatgagtgggaaagagcgtcggctcgccgactgcacgtcggaagatcttccggttgtcttcgccgaatccggtcgtttgagctgcagtgttccggaagaagaaaaagctcttcgtacgtctcgaccgcccagaaatcgaccaggccgccggcgcctgcgagaagcgggtgcggcccgaccgcaggcaggtcctccggccagtagttgtcgctctcccagccgtgcgtcacatcgtccggcttgccgcggaagaggacgtcgtcgagcggcgagtggttaaagacgtcgcggaaggcgctgttgacctgctggagccggcggagcgtcctgcatacgagccagccgaggatctcgagccagacctccggcgggatagccggcgtcgtcgtcgcgccaaagttatgcagcatggcgagcgggcaagtggggcgagagctgatcattctagagataggtcgacagtctggagctcgtggaaggatgggtgtctggagggaagccgttcgacgagcctcctgacggcgagagcgtaggactgctgcgcgcggcgacagcagcaaagagagcgattcaaccgccgatcgcagaggtcagatgagacgacgatgacaagagcttgttcaaagcgctatcagctctcgtctcacagatggcaggaggcctcagctcgttcttccgagtcggcgtcgacaggttgaagcagaacggttctcgacgaggcccgacctcgctcacggcgcgggagctcaacaggccgctcgccgcctgccaacgttgaccccagccttcccctcctgcactacgaggcgtgctcaccgacagcaagctgcctgcaagcagacatcgatcgacccttcgacggctgtctccgccagggagaagctcgccgcctttctcggtcggtcatacctcgctacttcgcttgccccggcgccctcaacatgcggggtcgagccgtgggggccttggctgccgagcgtctcgcggtctgactgcttactcgcttcgccgtcttgcacgacactccggctcgcttacggcgccgtacctctaaccgctgattggcagctcgcaatacatcggctcgctcgcctccgtcggctccgacttcagccgcaggctcccggccccggccttgctgccgtgacactctcgatcgcgtcctgcaccttcgcctaccgctcgctctctatggccaccgaccaggaccgctcgagacgggaggctagctactcgtaaagagagccggctgggtgattcctctttcgactttatcgaacccttccgcccccgcccttctcgcctgctagacccctgccctctccgacccagagctcagtgccttcaccccctcgccgacatgtctgacgactgcttcgggcccatcaagtctgtccctttcctctatccgcttgctcgtcggtcctccgactgactcttacccgacgcaccctcctcagccccaacgtcggcagcccgaatcgtgcgtcgacgaccgccgctcattcggccggtccgccaagggctgaccttgcccgcttccttcttgagtcatcaccggcgaggtcgagtacgacggctatggctacaaggtccgggcctggtcggcctttttcttcgtcgccgcctttgccttgagtctcatcgctcactgcatccaggccggcttctcgcgccgccgccgcttcctctactggacgatctgtctaggggcggccatcgagatgggcggctgggcggctcgcctcacctcggcaaagatgctctactgggtgccgcgattcggcggcgtctgggcatcagacggcttcctcccgcagatcgtcctcctgatctttgcgccggccttcatcgccgccggcctctacctgattctcggcgagatcatcgagctcctcggccagcgctattgtcggctcgagccccgggcttagtgggtccttcattgcgacgcgcgccattggttgacagtcccgactcacgctcccttcgtgccctccagcgtctggctgttttgtaccggcgacgtcatcagcctgctggtccaggccgccggcggcgggattgcggcaacgtccaagacgaatgagatggctgacctgggcgcttacatcatggtccgttccctcttgcgctatcctttcgagcgactgctgacccccccccccccttccgtctgtcccactgtgctcttcacaggttgccggagtcatgttccagatggtgagccctcctcgcagtctgcgctaccgacaccgacgccagcagcgactgatcgcatcctctacctgccgcccaacccaggtcgtcatgctcgtctttacggcgatcctgatcgagtttgcctaccgctacagcaaggacaagccggtcaggcagctccgctcactccacccttgggcctcgtgcaccggccggcggcgcgagcgaaaggctcagcaggccgctgccaacggcggcttcttcaacgtgatggccgatagcacatcaaacggtcccggcgtctacgggccgcaggctgagcgcagcgtccggctcatgctcatcagcctctgcgtgtcgaccttcttcatcttcgtccggagcgtctaccggtacgtcctcttcgcttttctgtcttatggccatgggctgaccttggcggcctcctccctcaacctcaggtgccccgaactcctctcgggctggcacgggccgatcatccagaaccagacgctgttcgagattctcgacggcgccatgattctcgcctcgctcgtcgccctcaacatccttcacccgctctggctcctgccgcgcaaggagacgtcgtccgcggtggtcccgctgacggccatctacaagctctagcgcttgtgtcgttgttcttctgcccgggcgaccttcctcatcgctccagccctttctccctctctatggtcgatatcatgttccccgcgacacgcacacgccaggagaatactcagcggtcgtggcggccaacgtcgtcagatggtgaggctcgcaggattcatcgccttcagccagccttcgcgctgtcagtctcggtgggctcgcttgccctttttgcccctgatcctcgcgggtcaacgacagggtgctagagccgtagtgaggccgaaggcatgaattgaagtgcccgcgcggtcgcctcggcgcgagggctccgtctccacgcgggaccagctgctcggccgcgtctgctggccctgtatcgtccgacctcagccccacccagccactctccccccacccaccatccatctctcaggatgtccctctacctgtcgacagcagacctttcatccagcctgccgaaaccctactcggccatcccgccccgtcgtcggcggtctttgcccaaggcgtcgtcgtctggcgccgctatcagcagccggcctccgccgccggcgccggtcgccagctcatcccgtcttccgacgccagcagtcgacctccggcgggcgtaccagccctcacgcactggcggccagcaggccggcccgtcgcgctgcgtccgcgattgctgcgagcaagcctcgctctttgggccggacgacggcggcgacgacgatggcggccagtcagcgtggagcaggagtcagccgcgcaggcgacaccggtcgtcgccccaaccgacgtcggcaccttgggcggccctcgttgcctccctccaggcctcgacggcaccatccgacgcgatgccggcactcgtctcgggctcggccgagtcgtcggcttcgtcgctcctgctcacgccgccggatgagcgaccggttttcgccttcaccaaggcgccggcggcgggccggcaaccgcgcgctggacgtgacaccctcgtccaggagctcgagggcggcttcgaatgggcgctcgagcgtgccatcggcagtcttaagggcagcctcgcaacggccagtctcccgataaggcgtcggaggcgatccacgcagcaggacggacccgccgccgccaaggccgcaggcgactctagcgcgattgtcgtcgctgctgcttccgccgatgccgccaatcccagcccgcgcaggccgcggacacgaccttgcgaccgactgccggtcgagcttgggtcgtgtcccctcacctgcacactcccgccaccgcccttcctcatcgtgccggctcgcgtccgctcccggccgcttaccttaccgacggacaaggccgccgctccccgtgccgcgcagccgcgtccaagactggccgcgttcttcaccctgccgccacccgctttcgccttctggccaccgacaggcgcacacgccacggcagccttgtcgacacctgcgatcgtcgttctgccctggaacgccccgccggcgggcgaggccgagacgtaccactcgtcgctcccactcctgccgatgagccggccgccgctgccgaccgaggtccttcggccacactttccggttctacggccgcgtgcgctcgagcgctacgtcgtctttggccacatgcgccgcgcaggtaagatcggccaagcgagcggcggcggcggcgagggcgagtggcgccgtgtccgggagcgaggccagccgcgggcggtcgggctcggtagtggactccgctgggaggtcccttgctgagcgagcgccatgttatgacctcgttgttttatctgagccagcgagatttttaggcaagaacagcgagcagggcgctctgggtcacgagactgatgccgcctccgccacgctgcgcacgacagaggcaccggccggggagccccagcgtaatgccgtatccatctcgtcgtccctccgactatcgtcattgcccagccctcgctcgcactgaaagctctattgcctctttgatctccgagcctgactcgcaacccagcaccgagatgggcggcgtcctctcctacctgctggcctatgtcctcggcggcctgacgctgctcccgctgctcgccctcgctctctgtgcgtggccgttcctcttctccgtccggacaacagcatcacagcatcgcatgctcacgctcctgacctcctcgctacctgcttacgaactgtcagacatctacgtctcggcgccctttggcgatcctgacccggccaagctcgtcaagtcggccatcgcaagcgagcaacctgcctcgccggccccgggctcgaccgcagccgagggcgagggcgccgcaaagcagccgccgtccaagggcctaccgcctcgctatggctggctgacggtccgcaagtcgttcaagccccgggctgagcaagtaaaggacggcgcggccggtgcgggtggcgtcggcggttcggcagcctccggctcatctgagccctcgagcccctcgacggcctcgacctattcgtccctcctcctgcgctcggtccgacctaacggcagtaaagacgttgtcggcggctcagcagccaaggatggtgcgtcggctacccagccggcgctctcctacgtccctccgcccgagttcttctacgccgccctcaagggctcgatcctctacctctacacgtccgaagctctcgacgagtgccacgcggtgctcgacctccagcagcacgacgttacgttctacccagttgatggcctgctcgacggcgaactctatgccaagcgcaacgcgatccatctcaagccgcgcaagaccgagagcgcaggcagcagcccggtgggcggtcagagcggcacttccactgctgctgctgccgagctcgacagtccggcgggcgccacacgggggcggagcccggtctcgtcgctcctccatccatcggcctggtttatctttgtccagagcaacatcgagatggaagagtgcgtccgtctcgatcgttgggctccctctcggttgcgatgctgctgcgcgtccactgggaactgacgcaacgtcttgctctgcagctggtacctcgccctcaggcatgcgtcgtccaaggacccgtacgccgcaccactcgaaagtcttacctctgtcttctctcagcaggtcaaatcccccctcgctcgctcagctgcacgcggacctacccctgacccttcttccctcgcaggacatggtcaacctgattgagaagctcgacgctgagccagaccagattcccatgcgctggctcaacgccgtcttcggccgcatctttctcggcatcaaccggacggcttggctggaagacgtccgtccgctgtgttgagccaagctctcgcgaccaggcgctgacactctccttcatttcgttgctcaccagtttatcaagatgaagctgcacaagaagctccatcgtctcgcgctgccctcattcctctcgccgctgatggtcacccaggtgtcgctctcggccccgccgccgaccttttcgcggccgatgctcaaagatctaacgaccggaggcgaggcggcgatcgaggtcttcctctcgtacccgggcgagctccgcgtctcagtcacgacgacggcgacactctcgctcggcagccgcttcaagagctaccaggtcccgcttgtcctcgccgtcgtcatcaaggagatcgagggcgatctccgcgtccgggtcaaggctccgccctcgaaccggctctggtacggcttttccggcgagccaaagatgacgatcgtacgtccgctcgctcttcgctccaacgacaggcgactgacttgctgggcgcacccgagcagaatgttgagccggtcgtcagcgcgacgcaaatcaagtggagcctaatcctcaagccgatcgaaaagcagctgcgcgaggtcttcaccgagtcggtcgtcctcccgaacatggacgacatcccatggtacgtcaagtccgctgctttgtaggccgtgaagacacccgctgaactccctttatcccccgcgcgcaggttcgacacgaccgggctaacccgaggcggcatctttgccgatgccggtagacgcaacccttccaccgccgcgactgcagccgtctccgtcccggggactccttcgacgcctctcgattcctcggtcgagccgcccgagacgctcatcgactcgccggcaccgtcgctttacaccagcagcctgcgcaagcggcaagggacgacgtcatccgtcgagtcgcctgacatagacgtccgaccggctggccacagcattggccgcgtcgagacggcgccgccgaccctggagcagccaaagaaaacgtggtttgggggaaagccgctcgcagagagcatccgatccgtctcgctcaaggctggcaaggatgagacggtcctgccgtcgtcggccagcatggtctccgttgcttcgtcttcagaccaggtctcgcctgaagtctcgacgaccgacatcgctggacgcggccagtcgacctcaatccccgggcacaaggtcgacacgaccccagctcctcacccgacctcgccaccgcaacaatcaacggtcgacccaatttccacaggagtcgctggcagcgagcccgagccgtcgacgtcgcccagctcgtccaacctgtctgcggcctccgtcgtctcggcttggcggaaccgcaacacggacaagcaagcgctgacgaaccttgggctcgaggcgcgcaatgcggccaagaagtggggcgcgacctggacgacaaagcgcaagggggccgccgagggtggcccggacgagttgaccaccactgctcaaggaggtcacgagcgcggcagctcggccggcaactcgaaggacctctttggacggttggccgcccagctcgcgacgcctgctccttcaaccgagtctggagtcaatcggccgctgtcgccacctccagcagaggtcgctccgacgtcgagtccccgactaccgagcttgacgcggacaccgtcatccgggggcaaggctgcctcgcccgtccgtgatggcggcactatcggccggtcgtcctcgctccgctcgacggagccgacagggatccgagcgatgccggctgccagaggaccgacgacagccctgagcgcctcggatcgcgatccgtcgccagcttcgtcaaccgggccgggcgtgtcggaccggaagctctccatctcgtcgccggccgacgatcgccagccgatcaacctagcccctgtccggacgcagatgagcgcgagcaagtcaatgtcgatcccttcaatcccggctgcacgtcggtcggcggagcagtcgttctcgtcccagccggttgccggaccccggtcagatgacggcgcagacgcacgctcggtcgagtcgggctcgtcgttcgagggccgcagccgactcgggagcgtctacaggttatggggcagcgccagcagcggtgggtcgactccagctgctgtgccgaaagatctggtcgaccctgtccaggtcaccgtcgacacgccgaccgaccagacagccgtcccgtctgctccgttcgacgctggcaccttgccgggtcaaattactccaacttccgccgcgtcagcaagcaattcgccgcagctcccgccctctctgcccgtccggccgtcgccgacagtcatgaactcggcgtcgcgcgggcggtcgacgtcaacctcgaacgccaatcccgtctcgatctcgatcgcgccaacgacctctgcgtcggaggagcagcggtcgtccacgcccgctcttgaatcctcgccgacaggcagcttcggcccaggcgccgcaggcccttccggtcgtgcgcaggagacgctcaagcgcatcgctcagctggaccgggctcgggcgagcgcatcgacgacggccatcactggctcaggctcggcgacgcctgccctccctgcggtagcggcgccctctctagtgccggcaccaggcgagcgtacaaccgaagacaccggagcagacgaccagctgccgccaaccttaccgccaagacccacgaccccggctctccctcctcggacgacgacgccagccatcaagccgcctccactgcccccgcgaacgtcttcgtaccagtcgttgcggacgctcgactcgtcgactgcggccacggatccggcgccaatagaggccgcgccatcgcctctttcaagtacggcagcggcagtcaccggaaactcgccagccgtcgcacgtccgcctccctcggaaacgatggcgcagcacgacgttgttcattccaggccgcaggagtctgtcccgaagccagccgccgccgatcttgagaagcagcttgccagcacgactgagatcgaccagccgccggcgacacgctcgcgctccgactcggagacgcgctcggtcgacggcctcttcacgtacgacgagcactgagcaggccggtcggctgaggtgctgccgtgtttgctccccttcatgatgatgaccacctccgatcgacgatcccgcagttggtgcagagctgggcaagcgatcattcggatcttgacagggctgtacacggaacagagggtcacatggctacagagttggcggtggcacaagggagtcggcgggaagcaacgagatgggggacacgagaacggggcgcagcaaggtggaagcggtccctagccgacgacgtcggtcggctggccctccttggggccctgatagatcggtcgaggtcagctctgcaactctcacaaaaccgaagaggtcctgctgagacttactttggtagggttgttgccggtcggcatgatgccctggcgctcgcgcttgagttgcgcgctccggaaccaggtccagccgccaaggatgaggacgacgacggcgatgccgccgaggatgcgctcggccccgccgggcccgttctgaggggtcgagtcgggcagggggtggccctcgagctggtgcagcagaaagagatgggcgtcagatcgggacgggatcgggggatgaaatcgagtgagcgcagcgccccgaggggggatggcgatgcaccttgggctgctgaggctgaacgccaatggcacggcgctgctggcacgaggaggcctgtcaagagagaagcagctcgggtgggtcagaacgaagggcgcccgatctcgccagccttccgttggctctccggaggaagcggatgaagacgcacgacggctcggggcgcggacgcgagctggcggccgatgatgggtgcgcggaaggcgggcgcggcgcggaggagcgtgcgagaggcgagcgaggaggacatgatcgaagcgaagtaaaagcaggagatggtggttggcaggcaagcggggcgagatggctactggcctcgtttgagtcaagcctggcccggcccgctgctgcctgcacctgccgccgcgtcggagggacggcgtcatgcgcccgacccctcgatcgacaggccgaaccaatcgatccgagccctgctggcctgctcctcctaccgccttacaacggcagctatgacaggggctagcagaatgcggggcaggctcgctcggacgacgcttccttccctttccccggcctctcttgcatcgaccaggtcgtcgttgcgcaagaaccggttcccacgctctgtcatcagccggcctccgactcgacccggctcagtgcaagcggttgtgaggctggaatgcgtggagatacaaggggcggggggcaaatgggagagtatacacaaaggggcaggggcagatgatggtccgtgtgggctctaatcacatggcgtggtggtgatgcaggtggtggtgcgagtcctggaggtcgtcgagcaggccgccgtaatgcgggtcgccggcatcgctccctcctcctcctccgactccatcgtcgccgtcgtctacgccgctcccgccgccagcgaccgacctgccatggtcgatgcctgcaaagtcaaacgcgtcgccgagatcaaggctgatgccggcgagctcgtgcgccgcaagcgacgacggcggccgggcggggaggtggaccggctcgggcgtcgcggtcgcgacgccgccgtcaaagctgagcgtgctgaagggcgagggctggaggtcgatgccggacatggttgttggtggctcggaggctggtcgacggagcgacgaagggtcgacgagctgctgctgttgcgaggcgttgggcgcgagcggcgagggtaccccgccgccgccgccgccgccagtcgcagcggtcgccgacgagggcgtcgtcgtcgtcggcaggggtgagggccggtggggtgaatggtagtcggacgtcggcccgcccgaagacggcccgccgagactcgacggcgtcggctgctgctgcggctgcgagggggcgaccgagccgccgccacctccgttgctcgagcctgccatcggcggcggcgccgctggaggcgtcccggtcgagaagtagtcggagaactcgaacgagagcgggacggaatgcccggcgccgaccttgatgtcgcccgggccaaggtcaggcggtcctgagggtgccggctcgagcgcagaaccgtactcggtcgagaccgggccctgataggcgtgctggccaggcggcggaggcgcgtacgcctggggcgacgtgccgtgcggtgggtaagacgccatcatcggcggttgcgagtagtcgcgtgatggaggtccgccgtaagatgaagggccggcaacggggccagttggcgggggcggatcgtggtagggcgggccgctgccgccggcctggacaggcaaagggatcgttccgatctggcctgagctgccgccggtcggcggcgctcgcagcggaccagggaccgggttggcgttgacaggacccggggtcgggttgacaggcgacatcggcgggggagggccgttgtaggcgaccgactgcaggaaagatcgagtcgagcgtcagcgttggcgcgcgggattcgtctcggagggagaacgccctggacgcacatatttggagatgattttggtcagcgcctcggcgagcttctcccatctaaacacctttacgtccttctcgatgtggcgcggcttcgggtcagggaagcccatgatgacttcgaaaaagtctctcgtgtcgtccttattcttgctgatggtgtcgggcttaaggccttcgaggttgcgccggatccgattcttctcctcgacggtgaagcggttgccgatgatggcttcgagcaggtagatggtgtcgaccgaggtgacctacagacgcgcgcgcgagagcagaaggagcggtcagcaaagggacgagaggggccgggggcgacaggggagggcgacgcacgtagcactcgttcttctcgagccgccagatgcacgagatgacgatcgtatctttctgccattcggcttggtcgaccggcttataggcgacctcgatcgtcgccccgacctgcttgcgccaaaactggacgagccgccgccggttctcaaactcgggccggctccagccgagggccatcgcctcgaggttgccgtggagctcgagcttggccttcatcgtcgtcgtcacggtgaggccgccgcctgggaggatcgacgtcgtcgtcgtcggcgctgcgtcgagcgaggccatcgcgctcgtcgcggcgctgctgctgccgctgccacccgaaggccggggcttcttcgtcggcgggcccttgggcgatttgggctggaggttgcgcacgagctggccaggcaggggtggagcggcgagattgctgccggtcgtccggatcggcggcggtgggcctttcggcggtccgccgggcgagtacggcggctcgagctcgacccctccaggcggcggaggaggggcaagaatcacgctcgggttggccgaaggcggcggcggaccccaagcgaggccgttcctgttcgcgtgctgcgggccatggccgccgtacggcgacgggttgtcgggccgcttcgggtcataggccgcccggctgctcggcgtgtgaagcgacgagggcgagggcggcgtgccgtgcggcgggtaacccgtggctgagctcatcaggtgcggcggcggggcggagctcgggtagccgtggtgtgttggcgggtaaggctgctgcggatgccgctgcgagtgggagtccgggtgatagtctggcaggaagcaaaggcaaggcgaagggtcagccgcgagcatctcgagtgaagagagggagagttcgacgcacatccgccctcgacttggacctcgaacccgcggtcgtactctgtcgggccggggtaggccccataatcgtgatggccgccgccctggatgtacgggcccgatgcctgctgctgctgctgctgctgctcgtcgtagcctgccccgtaaggccctggaggtggcggctgcgagcggtggtggtagaactggggtgactcgcgccggggcgagagcaggggcgagccggcccgcttcgaaggctggacgtggatcggagcggcgtaaggcgcctggggctgcggtcggcggtgctgctgcggttgctgcaggtaggcggcgcgatctaagagtgcggtaagcgaggatgtcagcgaggtcgcacaggcgagaggcgggactgtgcgcaagaaagagcgactgaccatcggcagcaggctcccagccggtcgcgccgtggtagtcaaactcgccgtaccacacgcgctgaaggacgtgctccggctggccgtggacctgattcggtcgcaggacctcgcagaagaggtagacgcgcccggccggctcgcccggctggaccgagccgcgatcgacgagctcgtcccacgacggcacctcgcagcggagcagcagctcctgacctggctgctcggcctgtggcgccggcccgcccgagggcgccggaggggctggaggctgcgggtgcgggttgcgcgcgaccctcgtcgcgacagggtatgagccgaagcagagccggatgacgttcgacgtctgcggggcggtcggctgagggaagagccggcaggcaacgacaagctcggcgttgggcccgagcccgccgagcgatgccggcgtgtagctatggatcttgagaaagagcgagtggtgtgggacagccggcgtcgagtgctgctgagcctgctgcggccggtgcgtcgatggcaagtggtgctgctgctgcgatgggtagctgccggcagacgacgagcccgggtgcggttgctgctgctgatgaggcggcggcggggcatagtactgtccgccgggcgcgtacggcagttgttgggcgtgcgttgatgggccgggcgggtacgagggcgagctcggcggcaagcggccggtcggttgcgggccgtgcgaagtcggagcgtggtacatcttgccgcgcttcgttggtctctctaagcggtacggtgcgagaggagcggcctgcggatgcgaacgacgaggacgagcgggcggcgaagggtgcgtccaagatagagagagatgcaaaagacgagagatcgggtctttgagagggtgtcggttgggtcgaggtcgggtcttgacggagagagaggaggatacgacggcaagaatggagatggaagaggagagaccgggaccttcgcctgcgagggaacacgagattagaggtagagaggagcttgggggtaggaggtgaaggttgggcgcttgtaagcgagcagggctgatctgagacaggacgagatggcaaggggtcagcgagagtaggaaggcgatgaggagtcgcgcgagatgttgcgagctccatttgcccctggtcattctcccatccgccaggctcgaagtagacgacgatgggtcgtctgcgaggttgatcggccgggcgcaggcgagctaagctgctgccgggagccgggccgttcgacagcaggggtacgactctttgcccggccggtgaagacgggctgatcgggcgaggggcgaacgccgcgaaggcaacatgggagagaacgactcacgtctttgtgaaacgaaggtcgggagccggcggggtcggcggcggcaaggggagacggggaggtctcgtaggaggtgtcgcaggtaaggagtcttaaagcgccggaacttgcataatctcctccctccccctctcgctctatctctctccgacggccggcggcagcggcaaaggacaatacggctcgaccccggaccgtcctcgatattcccctttcccatcactcggctggtcgcgccgggcgaaacgcgcggcccggtcctttggcctccccctcgccctccctcgcccctttgtatccgaggcccgctcgccgcctcgctcgccaaaagaccctccttcaatctctcttctctcgctcgctcgctcctcctctgctccctcccacctgtgcccgtccgtctcgatgcctacacctaccgcttccgctcctctcgtcgctgctcgctctcgaatgctcgcgttgactgcggtcgggctgacgagcggaattgtgcgcgaggaggggcgaggcggcctgatgggcgatgactgactgtcggcctgcgacgtaggaggtcgagctgactgacgctgacgccgacgatcggacgggcggtgctgctgcgagggaaagaagcgagaggagacatgtatcgatgctgggcgctcgttgaccgacagaccgatcgcccgaccgccatcgaacgaggaccgacccgggcggaggcgtcgtccgtcactcgtcgtcacatttttcgagagccaggggcggccggcctggtcgaggagggtgagatcgagcgcgcgcaccttgggagcagggagtctgagacggacgaggtcgcggccggcgcggctcgagaaagaggcggcaaagggaccgaggtctgtacgtacctcgaccgagcgcagagccggatagcggccggggtgggcttgcgttgcgctcaagctcaatgacacgcgaagggtcatgatgtcgagcggaagtcgtcgagagaaggtaaagtgcaagccgaacgacaaaacaagaggcagcggggcgagcgcaatcaggccgcggcctacctgctaccgttcaagcagttttcggataagtttccggctgcgaccgtcgagcgagcccgcgaaagcttgcagcgtgtcgcagatgccgctgagcttgggctcgaccgccagagcccgttttagagctgaacgatggcggctgtcgaagtcgatgaggcgcaagaacagcctgacgtccttgactgagcgacgcgcactaatgcgattgacgtgagccgtgaggaacacaactcttgatcggagagggttgagcagactgcggtagacgggaaagcgcagctcgtacgcctcgaggtcggccgtctcgatgtcgtggcagaaccagctttgaaaaagattgagaagcggccggagcttacctttgaaagggttgaatctcttgccgggctggtcgtcgcccatcttgcgcttcttggtcgacggtccctttctgacgtagccctcgggctccttcagcattcgaacgagaattgcgggtagggtgcgagggtttacggcgagcagcctctggaacatgacctgaaggagcgaaagacgttgcggctcttctgctcaaggaggacccagccgagtgtctggatggcgaagtgctgctggtttgagtccgccttttcgagcaggagtcggtcgatgtaggcccgcgcagagttgagctattcctcggacgtcttatttttgcacttgatcggctttttgtcgaaaggggcggggctgtaggatgggcgacgagtcaactcaagaagcgtttgagctcagcggcagaagggttgcacttgaccacttcgctctcgtcctcgtctccgtccgactgctcctcgctgctctggccgtcgttcagctcgtcgatgtcgttcgtctggccgtcgtctgaggaggccgctaaaccgacggactggtctttccttgataggtccgatgaagacgcagccgttgatgtcgagcgtcggcgcttgctagggctggaagccgtcgagggcggtgagcggtcgaccgaagcgagccgagcgggcgcctgcgaaggccggttgattgtcaaagcggcgagcccgacaggtcctgaggcagccgatgactcggacgacaaggagctgctgctgaccgagcgcggtcgaaccgcggcgctgaacgtacgtggtggagcacggaccgttggtctgtcgacttgcgtcttgggcgcagcagaattgacgagttgcgaccctacggtcgatgcgggcttgcgtttcactcgtgcggtagccagagacgcagacgcctggcccgctgttgagcaatcgaccgtgcgcgagacgagcattgcgccaaggatctcctccttgacagtggccgagacggacgctggcggggtcggcgccgagactgctaggttctgctcttcctttttgacacgagcgacgtcgaagcgaggcggggtcgagacgagcgtcggggagcgagtccgggacctgccctcattcgggtgccgctggccgtcggcaagcgtcgatgatcgacgtcggtgggaaagtagctttgtgcgcacgacagggctgtccgagtcatcgctgttgttctcctcagcgggcagctcgtgcggagtcggcttgacgtcgtccgagctgttgtcggctgtcgacaggcggggggtcgccggcgggtggggagcgaccaatggagatgagacgacccgccgtcggaccagacgccggctgcgagtgagctccgcggacgaagctgaaggcacgaggggttgagctcagaccagagtgaagaccggtcgctcgaagcacgaggacgcacgaggacgcacgaggactgctcaaccggtcgtcgtccgggccgcgctcagcgagctcagtgagcccagcgagccaacggccgagattggtttccaaaacgtcgagcctacgggaacagagagagtggcgacatagcacggtcagctgctggagctggtgctgctgctacagtgagcgagggcccgacgcacgtcgcactgacgcgagcctacttgagcgagccgagcgacgacgggagctcgacgtcaaagtgggtgccgtcgctggctgccgcgtcgagcaggcggaggatcgccggacgagagatgccagacaggaggactggagagcgcgacgacatggcagctgagaatgtgagccggaaagctcgctcggcttatcaggaagaggtcggagaggcgaagggtcgacggacgtcaaagggggggacagtgcgcgcgcagcggccaggctcttgctgccgctgctgctgctgagctggttctcacgctgtcaaccccgcctggacactctgacccgctctcgcacggcacaggagggacgcatggagagacgcataggatcctggccgggaacgagactgctcgcccgcggaatgtggaggaagaaggaacgtcgcgtgaaaataagcgcaaaaaggcgttgaggcggcgcgacaccgtctgcgagaaggcagactctgcttcaatcagcccctgtcagcgacgcagcgttgcaagaaaggcgacagaggactgacggctgagacggactcggctagggccggaagcgctggaggagatcgccgacgatttggaggcaggcctcattgcactcggattcgcgcaattcgacgagggcatcgaggacgaggccgccgtaggcgttgcggaagaagtcggccggctcgagcagccacttgagcgcttcgtagtgggcaacggtccgcggtctccgcgtccggatccgtttaaagtgctccttgagatgccggtcgacggtgccctcgtggtgagccgggaactcgacgtacgcccgaaggagcggcagccggtcgaggtacttgcgctcgtcggccgagacgatgccctgaaggatgtcgcgccggcacgtccggcggaagaccttgtcgcgctttgcctggtcgaccggcaccgacgacgaggcagtgctctgcgacgctgcagacgagaggtgctgctcatccttcgtcgtcagccggatgaggacgttgaccgcgttggcgccctgccggagcagcggatgcttccggtcgaggatgtagtcgatgcaggaccgcgtgctgccgagtgcccgggcactcgcccgaagccgctcagcgatggcagcggccgactcgagccgctcagcctcgcaggcgtcgaggatccggccatattcggtcgagaacttgacccgggcgacggccggcgcttcgtcgctctccgagtcgccgagctcgacgacgacaggggtgcgtctgctcgatgccggcgctgacgatgttggtggcctcgcagatgctggcgctgccggcggtaaaactggagacacgacctcggcagctgtcggtcgggtgacacgcacaatgacaggtgctgcggtcggcgctgttgactttgcgagagacggcgcagatgtctccattgctcgctcgggcgatttgagcgggcccggcgtctgcaggaaagaacttgtcgtcgggagcgtgacgggcgggccttcaccgacagacgcacgaggccggcctggcgcagcggaaggaggtggcggcaggcgcggcggatgctgcgccgacgacgaatgagctgccgatatagctgctggcacggccggctgcttctgcttcgcagctgctcggccgatgctggccatgagcgacgatgacgacgacgacggcggcggcacactcgacgccgatgagttacgcaaagggagggtcgcaggaagtcgggaagccgagtaggatgcagcgggctgcggcctggtagcggccgagggcggcggatgcggtggttgcgtcggtgctgctgccggcgctggaagtggcggagctgacggaggtggcggaggcgcgcgttttggctctgctgccgcgcatggcggcagtggcggcggcggcagttgaagcggctgattcggtagaaggggtgccagactggccgacgcaggcgcaatcgcaggcgcaggttcaagagctgaagccttctgaggcgatggagtgtttgcggtggcggtggtcggcgtcgacgagccgacctcagacagctctggtggggtggccggcttggacggtgacttgatcagcgacgctttgccttcgatggcccgacggcggtgcatcaggcgtgcctcgagcgccgactcgaccgctggaggaaggctgcgggtgcgccgcatctcgtcgagtgcagcataggcggccgggaaggcgtcgccatagggcgccagcgtccggtagttgaagagggaggcaagcaggtggacgtcggccagctcgggacgcccaagctggacgaagcgttgagtgtgcgtcaggaggagcgacggcacgctagccggcgggtcccagaaccagatggccttgagcacaggcacgtattcctcgtagtcggcccgcgagctcttgagcgtcatatcgccgagactcgttcgcaagacctccttggcgttgcaggcgagggcagccgccgtccttgggagcatcgccatcgcgaggattgcctggattgccttgaaaaagttgacgacgttgatgagcggatgccggagccggaggatgtaaaggaaggcctggtgcaggagctgggtccgctgctgctcgagcgaaaagaggccaaagccggtgccgtagggagcggaccatccggcgatgaaggcgagcagattcttggccgtcttatcagtgtgcatccggtttgcgctgttgaggtcgcgctggaagtgggcctgaatggtgcgcgcgcaatagtcggcgagagggccgacgccgaaagtctgaagcgagctcgtctggtaagggctgcgcgaggaggcgggtcgagggcagatctgagtcagcagtcgttcagggccggagcgcacagagcggagcgaggcagctcacccgacgggcacctcggcctctgccgcgatgattgcgtcgagcgcccggcccttaccctttgggtcaggcttgtcgggcagcagcgtctcgacccgggcctcctcctcttcctggtcctcgagctcgtcgacatcgctcgcgacctcgctttcaccttcttcgtcggtctcgccatcaccgcgatccgactcaaggcgcgggtgcttggtcgccgcggattgaccgcttgagggactgccgtccgccttgcgcttgatcgccccgcctgatggcttctgcgagttccgctcgggcgcaaagtcgtcctggccgagcggtgtcgagggcggcgcaggcgacaggcgcgggatcgtccgcgtcgcgcccgcatcggcagccggcgagcttgccctggcggcgctcgttgcagactgagcaaccgagaccgtgctcggtcggcgagaggtcgtagagggtccagcgacggcgttctcttgcttcctggccggagtcggcgccctgctggctggagctggcgcagaatcgcggagagctggcttcacgtcttccgtcgcagtcgcttcgcccaggctgggttcgaccgctggagcaacgtcaggctgaggagttactggcggatgcgagacggcagcaggcgggggctctttggcagatgccaagtcgtgagcggcggtcggagtgatcatgggcttgagcgagtcgtcgatgtccatcggctgcgcctcctcaagaggggccggcagcagtcgtgccgagggctcacgccaaaaggcctgggtcgctggcgggccgaagagggaggggtcgatactggcgccccagatgctctccgagagctcgtctggagcgagggaggccgcgtgcggctgcttctcggcactggcggcttcggctggccgctcctcgacagctgagggggtcgggcgagggttcgtatgagcaaggtggcagcaagtcctgacgcagatggcacccacagctgccctcgacttcatccgcttcgtcttccgagtcctcgccgagctcggcaagccaggtcttcatggccttcactcgcagcggaatcctggaggcggcggcggcggtgaggccactcgtcagctcctctcggcgaggtggcagaacggagcagtcgagggacgcacccagaggtcagacgaagctcgatgacccctccgatgcccttaccggccggcacctcgacgtcgaacgtcgcccctggctcagtcgcctggagcaggcgcaggagcgcgctgctaggcagcccagagaagagcatggctcgccctaggctcgggcgttcctagagctgctaattggcagtcgagccggccgatatcgagatgtaggaagagcgagttgaaaggaaaaggacaaggggaggaagggcgctgatggctgatgagagagcaatcgagacggcgagggaaggatgaatggccgcgcagccagacagccctgctgggtccatgcgtctttggtcgacggccacatgcctcaggattactttcaacgaagacctcttgctcgaagcgtctaggacatcagagcgctcatggatcgccgctcttgaatcccgagaagtactggccgcgaaagtccttgtgtcccggttcgcgctcgcgtgcgcccccgccgagggagatgccagccagctcggccgcaatgcggtcgtccgtcgagccatcggctgccggttgtgatgctgtaggagcgccgaatggctccgactcaaagacaggcggcgagacggggagcgcatcgggcgagagttcgagcgtgatgaggcctgtggcgcgcggggtcaagtcagtcagtcgtctgttcctgcacaacatcaggcgagcggaccgaaacttacgccgtgcccatttgccaaagtcctcgacgctgttgccgacgaccgtcatgccttcgacgagcgggacgtcgacattttcatacttttcgctgacgacgggcaggaagaagacgagccggccgccgggccggagggcgtagcgcgcgaggcgaacgaggtcgacagcgaggtcggcaatctcgtacggcttaaagggcgggatgtcttgacgaaggggcatggtcagcgaggacgcagaggcgagtggaacggtcgatgagctggacgcacagtcgggcatcgcgtgcgacgccttgccggcctccgggtggccctcgggaaagatgaagggctcgcgccgaactttggtcgggtccttgcggccgatccgcttagcgcccgctcgcaccccgtacggagggtctgtcacgatcctgcaaagaggggggaggggggctgtcagccagggatcgcccgaagggaggacgcgccccgtgagaacgcacgcgtcaaacatctggcccatccggaacgggttccgggtcacgtcaaaggtcatcaagtcgatgatccggtccttcgtgccatactgcgtggccgagtgaaggatgccgggcgtgtctgtcgcgaagaggtcgtcagtttctgccggcgcgagagcgagctgaggcggaccgaccttcgctgatgccctccttccgcgcccgctcgagccgcttctcgcgcgtactcgagctgacgccacgcatctgccggccgtcaatgtcgcttccccagacgacgcagccaaactcggcgcaggtgaggagcatgctgcctgtcccggcaaacgggtcccagacggccttgcccggcgcggcaagcgcctgcgaggccatcaggagcgagatatcggacgacatcgacgtgttgccgatgtgggcacgcgacttgagcgagtacttgtggatgagcgccgaggagggtgaggtcgagacctgagcaggagaggcgctatgtatcagctgcggttcagaaggaagggagcggaaggggacacgcacaagcaagccaaaccagcagccaagggtcggcggtgccggatcgtttggctccgcctccttgccgaccattcggatcgggtctgcagcgagagagctctgcgtcagcaaagcgaggaggggagcacgaggtgaatcgaaacctacactcagcgtacagatgcagctcgacctcgggctccttgacgtcaatctggcccttcaggtcgagataccttaacgtctttaactgctccctgcgaacgggagcgccgggaagggggggggggttgagggtcagcttcagcggcacaaggccgaggcaaacaaggtgatgacggacctgatctcgacgctcgagaacgcgtaactctcaactgaccaccgccagcgcgtgccggttcccgtgccctcgccgccggcgtgacctatgtcggcgtcccagagtcgagcgggcgagtcaaccgacaggccgcgcagccagccgtcgagcgcgccaaagttgggcgcaagtgcatacagcttgtgaatcgtcctgtgaagcccgtccccagaggagtcagtaggtgccctgccagtatcaagtgcaatcaagattgcatcaggacatacttgaccgacaccatccggccgcacaaccgacgcgcgtcggcgacgctccgcagcgcaacagggcagaccggcctggcttcgatgtcccaaggttcgctgcccgtcaggccgcactcgtcggcgaacggctgcgctgaagcagcgagagcgatctccgagctgaagggcgcgaaatgaaacggaatcttgaggagctgggcaacgctctctggggagggcatggtcgggcaaggtgagaaggcggatcaagcgtcagcgcctgtcgagcaagcactggaggcgggcaacggggcgcacgcagttcgggcaagcggaacgacgcatgcgacgtgccccaggtgatgtagaagagctgccagtctgggctggcgagctggctcgagccggcggagccggtcggcggggcggcggtcgcggcagtcgaggttgctgccatggtggcgtgagtctgtcgagctgcggaagacgatgaagcgcaagtcagcagctggtgtgctgggctctctccaggtcttccgactgacctgctgctgataggatgggagccagaggtgaggccgtcggtcgcccggagggaggtcgacgtcgaagggtacttgcttccgaaccaggatcggagacattttatccgccgcactccgcctcgcagctgctgctgctcctcagccttgccgcccctaccctcgctcagttccctggctccaagaccagcacgagacctcgcgcgcaacgccatgctcccgttgctgcgcatgcggtcgcttcggccactcgcctggacagcccagcggagcgggatcctgaccggcctcgcgacgctcgctcgaggccggaagctcgcctcgacctcgccgccgccaccgcctcggtcggtcgacgtcctgatcattggtgccgggcatgctggctgtgaggcagcagcaggcagtgctcgctcgggcgcttcgaccctgcttgtcactcagaagctcgcgaccgtcggtgagatgagctgcaacccgtccatcggcggcgtcggcaagggcaccctcgtccgcgaggtcgacgcgctcggcggcctcatgggcatcgtagccggtgcgttcaatctgactgagctttggctagcaggctgtgaaggtctggcctggggggtcgctcttgactgatcttttactctgtgctcccccacctcccttcgggacgcagacaagtcggcaatcacctaccacctcctcaacacgagtcgcgggccggccgcttggggtcctcgcgcccagatgtcacgcgtccagtacaggcagaacatgcagacggcactcgccgcgcaggactgtctcagcatacacgagggcagcgtcgaggaaatcgtctgggacgaggacggagacggctggaaggtcaagggcgtccggctcggtacgtctcgcgcgttctggcttgagcccacgacctgtcgctgacagaggctctggctggtccttcaggagggggcgccgtcatcgactgctcatcgatcgtcatctgcactggcacctttctcggtggagagtgcgtccctgctcgctcggcgcagcactcggtctccggcttcgtcgagcgtcactgctgacgtgtcaccccccctcaacttcaggttccacctcggaacgacagcctacccagccggccggctgaatgagtcaccctcgtcggcctcgctctcgcgttcgctccggtcgctcgacctctcaatgggccggctcaagacgggcacgccgcctcgcctcttgcggtcgtcgatcgactttgacggcctgcttcaacaagtgcctgacgggcgcaagagcaagccattcagcttcttgcacgagccggcgggcgagatggaccgggctggcgtcaacctcgtgcgttccaggcgaaggggtggaccgaagcgccgtgcgagtgctgaccagctctgctctccctcatccgcatgcttcaggacgatcagcagccgtgtttcctgacgaacacctcgccggcgacaaacgagctcgtccgggccaatgcccacctctcggttcacgtctccggcacagactcaaaggggccacgctactgcccgtcgatcgagacaaaggtcgcaaagcatccccaccttacggcacacaacatctggctagagccggacgggtacccgaccgagacgggtgcgtcacctctgtccgctcgaccttatttccggaactagtgctgacctcccgttgctattccttcctcaaccgcttctcgcccctgacagacctcgtctacccgtccgggatgagcatcaccttgcccgaggagatccagcggcttgtcttgcggacgtgcaaggggctcgagcaggtcgaaatggctcagcctggctatggcgtcgagtatgactacgtaaacccgcgcgagctcaagggtgcgcgcccggcccctctatccctgccgcagaaggacgacgagagctgaccctctgactgaatccctccgtctgacgcagccacgctcgagacaaagaaggttaagggcctcttcctcgccggccagattaacggcacgaccggctacgaggaggcggccggccaagggctcgtcgccggcgtcaacgccggactcagtgctcagggtccgtctgcccctctgagtgtccgaggcaatcgaccgatactgacgtccttttgacgacctcaaaggcaaggccccaatggtgctcggccggaccgacggctttatcggcgtcatgattgatgacctcgtcatgaagggtgtcgctgagccgtgtgagtcgtggctcgcgtcgccagaccctgcgaatgatctcaagctaaagtatcttgccaaccctctctcgtcccagaccgcgtcttcacctctcggtccgagtaccgcatctcgcaccgggccgacaacgctgacctgcgcctgacgccgctcgcgcacgcgcacgggctcgtcgcgcctgaccgttgggaggtctttgaggacttgcggagcgggatggacctcagccgggaggtgcttcgggccaagcggcagagcgcttctgcttgggtcgcggccggcatgccaatcactacttcgcccggtgtctcacgatcgtcagtcgtcctcccgatctggcccattcgtacatgtgctaatgctccatcctgccccccgccccccccagcgcctgggaccttctcacgcaccacggcgatctgcggctcttgcccgagctcaaggcctccatgcccgagctcgccgctgtcgactcgaacgtcattgcgcggctcggctacgagagtgcgttccgtcacgcgaccttcgcgaccgtcttcataccactgaccccctttcacctttgcttggactagagctctacgagaaccaggtcgccgtccacgacgctgagattgccagcttccaaagcgaggaggacttcctgattcctccctcgctcgattacgcctcgatccggggcatgtcggacgagacgcgcgacatcctcatccagtcgaagccggcctcgatcgtcagtatcagactctgcctcgaaaagcgaaccgatctggatgctgactttggatggctgctgcttcgcgttcgaccacagggcgcggccaagcggcttgagggcatgactccggccgctatccttctcgtcatgagcgccgtcctccaggagaaggctgcgtcggccctcgccccggctggcggcttgaacgcgcctgtcgctcgacgatcagcgccaggcgccggtgtgctcccgaaaccaccgccctttgccgtattccgcccagtcgcagttggctcgagccccgtcgtccagcaggccgcccgctcaatctgcggccgcaggtatagcagcaagccggccacttcagcccgtgatcggcggccgtcagtagagcacggccaaagtgccgcaccggcctctggctccgggccgcaggtgcccaaggacttgcgcaactactggcggagcaaatacagcagcaactacccgcgcaactggttgcggacgccgcccgccgagcggcagctcgatcagtgtccgtcgtccgactcggcccagatccggaagaccctgctcgagattatccgcttcaccgtcagcggcgagcggaattggctctccgactttatcgccgagcgcctgccgctgctcgagattcagccccaactcgtccagccgctcttcaaacggttccttggctccgtcgagcgcgagctcgcgcacgactcgtaccttggctcgtgggaggacgtctggaacatccgctcgctccaagccgactattcgggctacaccgacgacgctcgcggcggctcgtggctctgtgccgaaaagctctgtatcatccaccgcctgctcggctgggccgaggtcgagctcgttggccaccgtgagggttggaggaagacctcgcccgttctctacccgacaatcgaccggctcgcccgtctcgccgaggcaaccgacgtccggcagtacgtcaaccggtttccggccgcgcgcgccgtcaagcgcaagatcaagcttcacgtcggcccgaccaacagcggaaaaacgtacaacgcgctcatcgcgctcgtcaacgcccggtcgggcttctatgctggcccgctccggttgctcgcgcacgaggtctggagccgcatcaatcgcggaacgatggccggcatgggcgacgttggccgcgagtgcaacctgctgacgggcgaggaggtccgcgtcgtcgacgaggagagccggctcgcgtcgtgcacggtcgagatgattggcctcaatacggcgccggtcgacgtcgccgtcgtcgacgagatccagctgctcggcgacccgaatcggggcggcgtctggaactcgaccgtcctcggtgcctgcgcgcacgagctgcacctctgcggcgaggacacggtcgtcgatctggtcaagcggatcgcggccgagacgggcgacgaggtcgaggtcacccatcacacacggctcgcgccgcttgcggtcgccgaagactcgctcgacggcaactggtccaagatccgcaagggcgactgcgtcattgccttcggtcgcaaaacggtccatgcgatcaaggacgagatccaggcccaaacgccgctcaagtgtgtcgtcgcttacggcggcctcccgcccgagacgcgggccgagcaggccaagctgtttaatgaccccgactcgggctttgacgtcctcgtcgcgaccgatgccgtcggcatgggcctcaacctgtacgtccgctaaaatggtctttgtcgctgcagccgttcgaaactgacaccattctgtcatgtgacggttttgccagcgtcatccgtcgcgtcgtcttttcgacgatggatcactacaacggcaagagcctcaaaatttcgcaggtcaagcagctcggcggccgggccgggcgctttggcctccacggcaacggcatcaccggcagcatggcgacgctcaaccggccggacctgccccggctgatcgaaacgtttgcggccgtcaataagccaatcccgcgcgcgcgcatcggcctgagcgaatacgacctcgcccgtctctaccgcgtggtcgggtccaagacggcgctcgccgaggctgcgacgttgctatcactcatcggccggacgagccccaactttgtccttgtcgcgccaacgacactcgagattgtcggccccgtcatcgaggagacgggcatgagcctgacgctcagcgaaaagctcgcgtttgccgagacgccggtcaatgtacggaacgagttcctcggcgagtttttcaagtgcatggtcgccgaccacgccgccggccgcgtccacgacttcatcggcggtctccaggggacgatcgcctacaacacgtttgcggcggtcgacgaccttcgccggcggtttgagcaggccgcgctcgacttcatccgcgacgcggccgacgcccgggccgacctcaaagacttccggatgccggccctgacgatcggcgaggtcgagccgctcgaggagctccacaacctcgcgacgacctacctttggctctcgtaccgcttcccgctcacgtttccttacccggagccggtccggcgcttcaagacggacctcgagcttgcccttgactttgtccttgaggtcgtcgcgacgtccgagggcggcgaccggaccaaggctgccgtcgtcaagcggctcgagaagcgggtcgaggaccgtcggctggccgaagagagccggatcaagtacgtcactcggggcgaggtcgacaactcagccctcctcgccgagctggccgtccctgtcgaacgggccgccaacgtctcgcagctcgtctagaggtcgatgccccgcctctgcgcctacgccttctccgcattgttcttgtcctcatgcaatcgtccgctcgcaccatcattctctcgccctccgacgcgcttcatgccttcgccttgttgtactcgccggctcgcatcctcctcacgaccccctttccctttctcacgcctagtctacctctcagccccacctgcatctctcactggcttcgtccgacgtcgtcttagctcgcacaccaccacccacccttagatgccatgctcggacctctcatcggcggtagctcgagaggctgaggacgggcgggtcgggcgcgggtcgcgttgagatgagcgtcgcgcatgccccgcccgcatgcggcggcggccagccaggcagcgagagacttaagcgtgcaaaagctcgtcaccagcatcccaccctctcttcaagctctccacgacccatcccgctcgtacctcgtacctcgtcctcctcgaaaaattgtgagcgacccccgcgcgcgctctgtcgttcatccagtaagtcagtcggtcggtcggtcatcgaatcctctctgtcatccccccttctcccttctcgtctagtgccgacagacgccaaacacgcggacgggcgtttcgtcggccagcgcaccgtcactcgcttcgtgcgttcgattgggcgccccccacgcgcgcgctttactcgtcgtcctcggccgtgacgtacttgtggcggatgctgttggaacaaagcacgaatcgagcgaggagcggaaggggaggaacaggagtaagagaaacggaggaacaggacgggtgagtcagcaacggccttgagcggcgcgggggtcaggtgccgagcgagcgagaggggagagcggggacagactccttccactgcttctgtagaacggcaaggatgagacgtgcgtcagttctgagatgctcaagcgacgaggtgtgcagagccgaggggcgatgggcaggctgaggtcgaggctagactgaggcttggcgggctgagggcagcgagaggagggtacgggtcggtcgggctagccttcgagcagacagagggtcgaggctgacgagctctctctccccgttgaactgcaccgccgcacgtctcgcgcagtccccctttcccccaatccgaaccgagccaacccctccagacccacccgccgagtagaagcggataggaaggcaggcggcggacgtacgcccttgttccactggtcgtagaacgccgacgtcgcctggtcgtagccgaccgagaaggcgaacgccgtcgcaaagatcgaggtgacgtagatcgagttgcgcttggcaatcatcgagtagagggtctgttgggcgggcggaatgcgtgggagcgcaagggccggccggaggaggagcagcaagagcaagggcaggacggaggaggaggtcgatcgagcagcggcggcagcggcggaggaggcgtagacaggaagcaagggcgtcagctcctacaatccggttccagtcggtcctccaacttcaggagacggacgtttccgatagcggccattgttgcgaagagagagacagagagacagagagaaaaggagggagagggcgacgagcggggttgtggatgggcaggcagtgagaggtcagtcgggccaaccagcgccaggccaacccgccgttttccgccccgcccggccgcgcaggcaacaacgacgattgaccgccagccatcagcagccgaccctcctccctttcgtctctctgaccagaaagcgatggccgtcatgcccgacgcaggaccatcgaggacgcttgccgccggtctctctaaacgcggtgtacgtcccccgctttgacgtctagacccccagagctgcgctccgtgtcggccgcgacttcagcccgcgtcggacccgacctgcagcgcgacgacggggccgctcgctgtcgtcgtctatggaggaaagctgatattttgctgcttgctcgtgcagggctcgggtcaaggagggatcgtcaccggcaccgtccgtcgaactctctgctcgtcgctgcccaccgccgtccaacctgacctcttgcgccttctgtcacccccccccccctctcgcaggtaccgaaccacccaccaagctcgaccgaccacatccacgggcacaagattccgcagatcaacggctccgaaggcggcttctggggactcagtccgtccctccctctcttcccctcctcccgtcttttcctcgccctctctctctcttatgggccccgaccgcttcatccgcagtgagcaacaagcgctgacccaccccctcctctcgcgcctattgtcgtgcgttcgttcgtttcgttcgtcaaagcctttggcctcgcggcggccgtcctctttgcgggcctcgcaggctggtacatcttccttcgccggcgccgggcgcgtcagggcctcgcgcctcctcagcccttcgcattcctcgcccgctgccgccgcagggcgccagcgggaggctccggctcggcggcagggagcaatcaccgcggtggttggccggttgacccatctgaacgggcgtgggatacgctcggcgacgacaacgacgacgacgaggatggcttcgggcttggcggccgcagggccggccggacggcgcagggggagacgtacggcatgggtgggcttcggagcccagggggcttgcaggacagcagcggcggcgaccggcagcaccaccgggagcggtttgacagcctcgagccgccgggggggacgacgtatggctaccaccacgaggagatgcaccggccagacaacacacacccttacggctcggccgttgcaccggctagcaacggtgccggcggcagcagtggcagtgggggagggtacgtcccagcctcctcggccgactcctccctctcgctccactctgccgccgactcgtcgtcgtcgtcgtcgtcgtcacctcctcgagcgccctacgcctacttcgccagcggcgcagaaccgaccggctcgagctcgacgatccggctcgtccctggcccctctgccgcagcagccgcccacccgtacccggccatctcgtcattagcgggaggaggaggaccgatgcgcgatccctttgcctctgacgacgacgacgacgacgacggtggatcgacctctacgcgtgagatggccgaggacgacgacgaggcgatcgcagcgaggaccgtccggccgagccacgaccggggcgattctaccggctcgcgtttcgttgagggcgcctagccgccccccctccggcccctctcacatcccaccttcggagggagccatgtcgtcctggctctcctatttcaccggctcgggctcgtctggctcgtcctcgacctcggccaccaaggcccggacggccatcatcgacctccgcgagcagctcctgacgcttgacaagcaggaggaccacatggccaagaagatcgaggccgaggagcagaaggcgaggctgaatgcgacgaccaacaaacgaggtgcgttttaaaaacctatctttgtcggttggcccagcgtacgagggggctgggtggatcggcacgcccgccatctggcgggtcacgcgcgcgggcacgcatccgaacgcaggcccggatcgcctgatggggctgggaggtcacctggtcgattttcgggagcttgagactggcagaagggagggatggccgaacgagggaggcagggaggcaagcgtcgagcgattactcggtgggaggcttcgctcgtttcttgtcgcaccttcgttgtgactgtcgaacgagcactgcatcgcagcgactgacggctattcgtgtcctgcttgcccctttcccccacctgctccctttcgtttgatcgtctcgctcgcctcgatcgaacagccgccctcgccgcgctccgcaacaagaaggcgtacgaggcgcagctcgaccggattgccggcacgcgcatgacgctcgagacgcaggtccgttacccttcctcgaccaccctgcgcttgctctccgccctgtctccgcaacgagcttactgaccgaccggctcggctcgctctcgccagatgaatgcgctcgagtcggccaacatgaacctccagacgatggaggccatgaagcgcgggtccgaagcgctcaagggcatccacggcaagatgtgcgtgttccctgtctacctcttcttgtttgacctgttggctgatccggctcgcactgcacggccccccaggaacatcgacaaagtcgacgcagtcatggacggcgttcgcgagcaaatggagctcacgaacgagatttccgacgcgatttcgaatccggtcgggcttaacaacgatgcggacgaggtgcgttctggtctcctgcctaaagcgccttccgctcgtcttgcgcagaatgcccggctgaagcaacccccttttgattttggcgcgcgcgcaggaggagctcgcggccgagctggaagcgatggagcaggagcagctcaacgaccggctcctcggcgcggaccgggtgccggtccacaacccggcgggcgcgctcggccagaagcagcggcttgagcaggccgtcgaggaggacgacgaggaggaggcgctcaggaggctccaggccgagatggcgatgtgagcgagcgggatctgcgaagtcctgctctcaccccctgctgctgtcttccggttcgctttcgtcgatctgctcacccgcgacctccttcacgaactcaccatctggacgtcggttcgccttcgctgccgcgcggccgagagaccgccagctcggcgctcgcagagctgcgctgggcttgggagccgagctgtcgtcccgctcgcccgccctactgcgctgctcggcggcaacgcctcctcaccttcacttttccacgtccgaccctctcgccacttgtacgcccacccagacgtcctctaatgaacctcctttctcgccaagctgtcttgagcggaaccgacctcgagcgagaggtcagctcctcttgagccgtcggcgcgacgaggcacaggacttcggtcgcccttttcccggaaaatgacggctggtgggcagcgctgagacagggtgaccgttgtttagatcaagggagtgagtcgaagaagggtaggtttctatgaacaaggaggaagagggggttgggatgggtttaaagctggtccgccacatgaggtcaacgagcggacgggacgggaggtctctcggtcgggagagggcaggccaagaaactcccgtcggcgggctgcgcaagggccgctttagatggccttagtcttgacgagctgctcgaggtcggcaacggcgctggcgacgaggtccttctttgtcttctggtcggcgagcgccttgaggacgttcgactggaccgtcttgacgaggtcggcctgctcgccctcgcggacggtctgctcgtgccggacccacgagtcgaggacggccttggcctcggccgtgagggccgtctgctggcggagggtgaagttctcggcctcgagcgtggcggtctcctgcacaggtcgtcggaaggcatggtcagcaatgactcaacggaagtcgcgcaaggaaccttcaagacggcgatagtcctcccaatcctacgtcaacccagcctctatggctgtccggcctcacatgagaccagacggacctgctctcgctccatgtactcggcagacatccacctgcagagactcctcagcaggcaaaggatggccggtgacgcaccttggacagggcaaagagggccttggtcaggctgacgacgtcgttgaggtcgccgaccgagtcgatgcgctcctggacggccgacttgtgctgctcgcgcgactgctggagcgtgttgcggatgtgctgcagtgacaaggagagaaggaagatggtcgtcagcaagaggggttgaggggacggcgagagatggcacgccgcgtgcgcgcgactgcctgctgccaagcgcgcagcctccgccaagggataaccgtccttctccggtccccggcacagcaagccatcccctctctcaagccaaccctagccacgaggccctgaccgtcgcggaagaaggaggagggacgcacgtcaaccttgccctgggcccaggctccccaggggccggcaatcgagcggccgataccggtggcgaggataaggaaggcgacgaggatgacggtctcctcgttgacgacctgccaaagcagagaagagaaagaggcaagcagtcagtcgctgagcttgagtggttgagcgagatatggttcgggccgcccggcgtgtcaccgacgactgccagtctcaaggcacgccgccaagagatgccaggcaggcggcccaggctccgtccactcgcaggacaacaacgtcgagagatataggtcgcacgtagatctcgttgctgatggcagcggccgaggcgccgactccagcgaggaggatgccggccttgccagcaaccgaggtcgacgggaccgactcgatgatggccgaggccttctcgtcgggcgtcggctctggagggacgtaggcaaggtgtcaggacgccttccttgagtacgtagaaggcagggcgagggcgtactggaagcgtaagacctggcagcgaagagcagtcggaggaggaggtcagctcgtcgtgctcggtcgcacagcacccggaagcgcatcccctttgggtccagcgcaagttgagcgtggacggaccgggcagcgagcgacgggagggccgcgctggggcggacgactgcattgcgcccagacgacccggagacagagcacggatggcgcaaaacgcgagcgagagagcagatggggcggggggaggaagggcggcgcgtcagtcgagccctggaggaagggcgcatgctgcagcgacggccgctgaagatgcgctaggacggaccggccgggcggatcgagcggaggaggagcttggacgccatgtttgagaagagatagggatgagaaagggaaggagcaagaggggagaagagagagagccgatcaggccgacggggcggaaaagagcaggggccgccggaggaaacccccgatcaggggaacacgaaaaacccccgactcgaccgggccgcgcctcgagcgcactcgcctccgcctcatccgtcgtcgtcgttgtcgacctagctctcatccaggcactcgaagcatggccgccactgcccctcctacagccagcacagccgcgccggcaggtggtctggcccttccaacctcgaacggatcggctgcgacgaacggagttagcagcagcagtagcagccacgccgccaactcggcgaccgcgtcggcgccatccaaggcgagccgcatcgcgtcgtcgtcgtcggcggcgtcggcctcgctgccggtcgcagcgcctggcatctacccgtctgacagcgtccgggtgcgtgcagctcctggcaagctacggctcgcgtttctgcgacgcggatggatcggagactgacgcccgcagctgttctctcctccgcccggacccgctcgcacgcgtacgcgcagatggccgccgagagcatcggcctgggcaacctcgacgagagcgtcgcagtcggtcttgccggcgacgtcgagttccgcctgcatcaggtgatcgaggtcagtctgtcgctcgagagattgagctacgggttgcgtctcgcttgcgcgcggtcgccctgactttccttgttctggcctcgccgatctcaacctgccgtcctacaggaggctcggaagttcatgcggcactcgcgccggacgacaatgacgccggccgatattaaccatgctctgtcggcgctgtcgatcgaggtgcgtcccagaggccgactcgtctgcgcgcagcccgcccctgatgggaacgccggcccttcgacccgactctcagcccatctacggccacttgccactgccctcatccacaccccattttctgccgctcaagctcccgccgagcatcgcaacctcggccgctaacgccactggccagaagagcaagtcggccgcgcccagctcgaccgccgcgctcgccgctggccagtcgggcagcagcagtagcggcggcggcgacatctatttcctctccgaccccgaagtcgactttgcgcgtcttttggccgcacctccgcctggtcttgctggcggcggcgtccgttggcgggcgcactggcttgcagtcgagggcgtcatgccgcgcgtgcccgagaacgttgcgccagactaccaggcgttccgcgcggccggaccgaccgccaacggcggcagtcagcaggcggcagcggcggcgtacctcgtcaacggctcgacggcggccttgggcgcggttggtggcccgacagcggcggtcggcaagggcgccaagccggcgctcagtcaggagctccagctctacttctcgcgcctgacggccgctctgctgccctctgtcgaagcgagggccatcaacgcaagcacggcagccgccgctgccgcggctgcagcagcctctgcgggggccgccgccgattcgtctgccactcccggggaggcagcaggagccgcttcggcgatcgcttccgcctcggctgtcgttgccgagctgagtgaggccgagcgagcgaggcttgccgcgctcgcctctctccgcggcgacacgggcctccagggcctcgtcgtttacctcgtccgctggctgggcgaaaaggtcgcggccaacttggcccatctggccgagctcagcagcctgctcgaggccgtcaacgccctcatcgccaaccagacgctcttcctcgagcccttcgtgcgtcgttcccaggcagtatttgaggatagactaaactaaccttcattctctcgcacagctccatcaaatcctgcccatcatcctctcgcctcttctcacgtcgcctctcggaggcggccctccgcccgtgcctccgcagggcaaggcgctcgcgcccgagccaacgatgaccgacgttcgccagctggcggccgaagttcttggcgtgctcgtgcgcgaatttggctccgtctacgagacgctcgtccctcgtgcgtccccgttcggttccgacattgggcaagggccacagcggagactgactcctctgctgatccaccgtcgcgtccggtccaggtctcaccaagacgttgctccgctcgctcgctcctccccacccggccggtcgcgtccagggtgcgctgctcggtctcggcgccctcggtcggcacgccgtctggcgcgcgctctggggtggtgaagccgatgctggggcctcctcgcgcaagggactagaagcgactgccggcgggcggtcgtcgaagcggctcaagagcaagaaaaaggacggccggccgggcgccgtccgcgggccggaacgcctccgggcatggaccgagggctgggctagcaacgccagctggccagaggacgatcgagcgaccgtcattgctgcggctttcgtgcgttcccaagtccgatctcgtttactgggtcttccttgctcttgctgacactgccatcttcccgttcacaacagtcggtcctccccaagctgctcactagccatcggccctcatccgcaagcgcctcggcagctgtttcggactcagcggtcagggccgcgctcacatcagcattcggcccggccctcggcggcctgctcgcgagtgacaagtggctcgccaagcggctgctcgagctctctccggacgaacaacccgcgccgcctgccggggagaacaccgaagtcgctggctcttcagcaggagcgacgccggcgccggctccggcatctgctggcccgcagcttgattcgccggcaacgacgacgggcgagccagcgccggccccctctgctgaggcagcatcaagagatggtaagcaggagtcacctccacctttaacggcagagacctctgcggcaccggcgacgatcggagaggaggacattcagatggacgaggacgcgccgacaccgaaaccggaaccggaagcaacaacggcacctgccgagcctgctgccccggcccctgcttcgggcgcagccctgattatggcgccggtcgaatcagtggcccctgagggtgctcttgctcctgttcctgctgctgaggagtcagcagcagcggattccacgccggccgaggcggccgagggcggcgacgacgatgacgacgaggaaatggaggccgtgccctgagctgctgccatcgcattagagatgccatgacccatcggacgaccgcacaagagggtcctggccgctctcattcttcacagggaagccaggtgagcatgcagggcagacgactgacgtcgtgcagctacccccgttcctgcgagaagcgacagagggccttccctttcttacgatagcataagcgagtctcgtgcggtcaaagaaagctgggacagggtataccggagcatcttgactggcagctgagccgacagcttgatgtcaagcttcctgatctctgctcgaacggcggaagcctcgtcttgcctgctgcggagtcgattcagcccagcttcggcagcaggccgggtcggcgagcgtcgaagctgggtccggaccatcatcttcttcgcccttcccctctctgccatcgctcgacggatgctcgccgcctgcgtccgagctgctctccggacgaccgctgccgaaggaggggcggcgcctctcggccgatccctccgtcgagcggcatcaaccgagccatcatcaccagcgggcagcgcgttctcgacgcgagcaacgctcgccactcctcttccgggccccagcagctcgtcgtcctcgtatgggccgggcgagcagcggccaaacgagatcttgatcgaggccgtggcctcgggatctacaagctctgaaggctcgtcctcatcggctgctggcggcagcatgccgtcgccttcatcctcttccgcctcgccgaccggcaacccgaccgcgtacccttccatgccaaccctgccgccgcttccgacgcctccagctcatggcggaggcccgtcagctacggcaggaggctcatcgtcatcgccgccctttgcccgaccgccgcatccgcatccgttcgacacccattcgatcgtcaagcatctcgaggccgccggcttctcgcacgacgcgagccgcgaggtcatgcgagcgacccgcgaactcgttcttcgtcggacagagcaggcccggtccgagctccttggcaaggaggacatggagaatgtgcgtcagaccggggatataggatcgtgccgaagctgacggcacctcctttcgtctgcatcttcccttcgaccctgccaccttctccttgccgtcaacagcaagcctacctgttcaaggcggccctctcggagctgagaactctgctgtcactcaggacacggaatggccaggcctcggtccgctcgctcacgctttcggccgagcgcgaggtcgagggccttggtgatcgcatcaaggagggcgtcgagcagctcaagcacgagtgagtccagtgcctgagtcgatgaaggggcggcgctgcaccatggtgttttgctttggcggcgtatcacctctgtcaggctggatccctgccagagttgaggctgacccggcgcctttcctatacaggatcgatatcgagctcgagaatcggaaagccgacacgcggagcgagcagaaggcgtacgagatcgcgatcgaggtcagtgcctgaagctgtcccttctgttgaccgccccgactgacgcctccgggacctgctgccctctcaggagctcaacaataagtttacgatctcgctcggcgacctcaggaccgacatcgagcagtacaagtgggaggccacacggaagggcattggtacgtgctcacccgtcttccggtgctccaggcagtcagctgaatctgccgcacttccctctagttgtcattgcaaccggcgtgctcttctttgtcggctcgacattgctctttagccaggagccgccgccgccaccacctccagtccttctgccgcccgtgggggctgccaggacaagcggcagcggtgcctcaggtaagaagcgagcgggaggtgggtcgagcggcggggccggctggctcggggatgaggatgagggcgcgtcagccgagggcgggcgcgaagtcctcggaggggtcgagggcgcgccttgacaaagggatgactgttgatcaatctggcgcatcatcgtaaagcccgcagaggggccaacttgcacgtgcacctcgtcgagcgagcgagcgacctgcggtgacgatcaagtggggtgaggtggcgctgcctcctgttgcagctgctgcgctttgtgtccgtccgcccttgagcgccttgctcagcctcctcgttcttgtccttccctaccaccatcgcgccactcgagcaagcatgactgccgctccttctcgcaaccgcaaccccttcctctcgccagagacaagctctgtccacttcccgccatcctcaccagggccgagcatccattctgcctttgccgacctcgacctcggccgcgagcagccggcgctgacgccgcagcacaccgccgcctcgaccacgtcgaacaacccctttctcgaccggccgcttctaccctccgcggcgacgcgaccccagcagaccttgtcggcgtctggctctggccggccgctaaatgctcaggagctggccgagctcgaggggacggccgtcaacgttgttgtgcgcgagacggcgccgacgcccgcagcggcgacctcggcctccagccagccggtcgagcggccgccatctcctgaaccgccagcagcctcgagctcgacatcaacagcatcgagcagctacgtaccgccggtatacactcgccgtgtggcagagggaaacgaggactttagaggtgcgagctcgctgttgtggccggctcttggcatcgcccgcgcactgacaagaagcggccaccctgtcacctttgtagacgacgacgaggcgctcgaggctgccattcaggcttcgctagccgagtcaggaatctctgctcaaccgaccacaggaccgtcgacctcctctgcgagcgtgcggccaccaacgttgccggtgcgctccaaagcggaaacatacgcacccccggcgggtccacctccgatcccagcggttcggccgccatcaccctcacagagcctgccgcaggccgacccgccgccagcgtacacctcggcgtcccagatggccgagagcacgatcgacgccgggcctcgtgtgccagatttcgcgcgcaggccgacgacgcagccgctcgagcctcagcataccggctggagtgacggaggcggcaacccgggcggattcttcgagcctggcgactaccggccgcccggagtctcgcccgcgcctcccttgccctcgccgctacaaaacccataccctccgcagcagcagccgtcgcatcactacacgccggcaccgccactccctcaccgaccgcagcagcagccctcgtatggctccagctcgagcggtcagatcccctttgacccgacgccttcgtcgataccaatcatcggccggccgttcctcaacaacggcgccacgctcgtctatccggccggcttccagtgctacaaatgctcgaacagcgggtgcgtgtcggctctgggcgagggctttcaacctcaaccgctgctgatgccgatccctgtctctcacagttggaaggagaacgacccgacgcatccctgtcgcacctgctggaagaagtacggccggccctactcgtcggcccacgcccttgcctggaacccgccgccgccgaccttccagcgcccgcttggagcccagcaccggccaatgtacgcctctggcccgtcatcatgggcgagcccgccaggcatctaccgaccagtcgtccgggccccaccggtcggcagcgtcgtctaccagccgggcgaccctcggatcggaggccgactctgccacgcttgtggcggctcgggcctcaagattggcctcttcttcgacgatgaaacgtgccgggtgtgtggcggcgtcgggcgcctcttctaggcagcagccaacctgccaatgatgatgacaatgggccgcacttttctcctcgcaatctgatgggcgcatcaatctcagtccgtcacctgaacgacctcgtagcctgcgacgcccccgaggccctcgctccggaggaaggctcgcttgcgaccgacccagacgagctcaatgccgctcaggacgttgccgaggccgatgacgaggccggccgcgtagtagaagttggcatttgccgagccggcgtgaagccagagatggtggaggatcggaaagagcaacgacgcgtacacgtggaggccgatcggaatgagcggccgcgagatgtctgcagcagggtggacttgtcagcgcccttgacgaggaacggagcgtggacaaaaccggtcgtacggggtatcagggacgggaagaggggcaagaggccgaccgacaaggacgttgcgccgagcgttgggtacgtctggagcgtcgtcgtgatccacagctggcagacgaccgcaaagagtgggtcgctccggaaggcaaggcagagcggaacgacgtagatcaagctgtgaagctggagaaggggccggttcagcatcaggttcggaccaagacgactccctcaggcaactgacctggaagacgatgacaaagaaggtccggaactgctcaaacatctcggtgaagaagtctgtgcggggagaaggccgtcgagtcagccagttttgactgcgtcagactgccgatatgctgggacccacaccacgagaggccgacgttgggcgtcaggtcgcggatgccgaggatgacgctccagttccggaagacggccgcccagctcccggcgatcgcccgctcgagcatcgacaggcccgagaggaaggccacaaagagcaccgccgacctggctgcccgacttgcaaagggctttgtcgggcccgccggcggagggaggtaaagaaagagagccggcaaaagcagagccgggtagagagcagtgcgggtcacaagcgcgagcactagcaaggccagcgtcgggtaggcctgagcgccaaacgaaagggcgagcaggacgagcgcgttgtcgaatgtcgccgttgaccgaccgagcgttgtgaatatggtgtacgggttgaacaagaaactgagaggcccgagtagggaccagcgcggcgtcagcgagagactgcagcagaggttgcccgccccagagcgacgcacaggaaggccacgaccgacgaccagttgcgcctgccgaccgtcgactcgctgccctcgcgaacgcgccgggtccagaggcgggcgagcgcgtgtgctgccgcgaggtcggccgaagtccaagcgagagccgtcagaaagtcggacgaaggcggcaggaagacagacgaaaagtgcagctgcagcggcgactgtagttgacaggtcaagcttcaggttagcttccttgcctcctaaagtggcgtacaggagctcaagcgtgagctagagcgcaccaggagcacgagcccgccgtcatacgggtcgatccctttgcccagcaggaagacgccctctcggagccgccggaagctcgtcaacggcgtgctgagctcagggcgatccacgaagacagccatagtcgcctttgggagccagtggaagagcatgagccggacgagcgcgccgaggagaagcacctgacggagcgagagggtcgcgatgaaggccgtcggcgaggctgtcgaccggtcggactcggccgctgccgctgcagtcttcactgaccgtctcgagccagagttcgagagcagagcatcggcacgcttggtcgcttgagcgatcaccgacggcctggcgatgcgagccatgctaaaagggaggttggagaggagcgtgggacgcgatgagtgtcgagggcgagctgtcgttccgtcgcgagcgcagccaacgtcgttcgtccgccctagcgtcggacgtgtatgactgcttgacctccgatctccgtacaagaaggcgagcgatccgaaagagccctcttctcgctaccctgagagcagaaagcagccactcgccggcatgtcctcaagctcgcaaggcgaggtgcagcgcgagctctcccttggatgcgcagccccccacttcatccacaggcggtcgcacgacgagacgtgcggatgagagggtgtggtgccatgaaatctcggccacactcctacgccttggtctcctttagcttctcagcgttaggcaagatcctaggcttctgatagtggggcggcgactccctcgcgctgttgacagcggcgatcggccgcgggattggggcggcactggccggccgcgggaccggacacgagtacttgcggaagatcgtgtcgtcaaagagctttggcgcaaacttgccgaggagcgcgacctcgttgagccggataaaagtccccgagaagccgttctgctcgaacgagccggcggcgaggtcgacgacggccgggttgagcaaaaggtggtggcggaagacggtagccagaccctgggcgtactcgagccgcttcgggtctctgggtccgcccaatggcgggttgagcacagtcagggagaatctgcggtgagcgatcagggtcggccgcgaagggtcagcgctcacaccttgacaagcagccaccgcgcgaaaggagaagacggaccgcgcctcggatccggcagggaggctccagaagttgagctcattgacggcgaccgggtcgtcggcccgcggatcgcagtgcttgacggtgagcgacatggccgtgtcgtcaaagacgaggtagtcgaacgcaagccggtagtctgggctgtcggggcgctcgcccatcgctttgaacttagcccagatggcgcgccagatgcgagccgtcgcttcgtcaccctcggcccgctcgaggtcgaggttgtgcatgacgacgacccgcggctgggcgtcggtgtccgtcgcaaagcgacccgggaatcgcgagagctcgacctcgatcgagcgccggacaggctcggcaagctcggtcaggtgggccgaggcgagcgtcgatgagaggacgtcgtggacgagcggctcgagcgaggactgcggccagatgccaaagtagcgctcgccggttcgtggggtcttcctaacgggaggccttggctggcttccggtgtaggtcgaccgcggcttctgcatccgttcattccgctcccagtagccttgagggcgaattctgggtgcacttcccgccttgccagaagttcccgtcttgctagagagaccccgcttgaagcggtccttcttggttgaccgagcatcagagacttcggacgtcggccgtgggttgcgctgcgcccgtgccgtcacccctgacgacgagcccgccgagtctgcgcgttacaatacagagtgacagagcatgtcagtcattgaaaaggagaccctctggccgatgacgagagaacgcgccttccgctcctccttgtgcactgctagccgagctgccgaacgctcgctgaccgccggccgatggtctccgtgaggtcgaggctgtcgtggctgctggaggaggtgccgatcgtgctgcgagcgagagggctcggacggccgcccgattaccggccagagatcgcgcgccgtacatgatcgagcttgatgcgtgctgctgtcggttctgaaggggaattaaagagggcacgtcgtgcgtcacggtggtcggcaggacgagctcgagactacgccgagggctcgagagggttcggactcaagtcggaggtatttggttggatgcgcgctgctggccgcagctcagccatctcgcccccggcctggccttctcgcccgtcctacctcttctcccgccctgctcctctccgcgctcgccttgcctgctctccctcctagagagctcgcaaagatgccgtctatgtcgtactcgctccctaagctgtcgaagccggcctaccgcaacacgtcggcccttctccggtttttgatccttgcgacgatctcggccgccgccgtcgccagccggctgttcgccgtcatccgacacgagtccatcatccacgaattgtacgtccgagggctgagggttgccttgttagagatcctgagctgacacgctctcgagcccgccgctgtagcgacccgtggttcaacttgtgcgtccacccgagcagaggcgcgagctcgagctcgcgaccggcggccctggcctttccttcccttggcctcgagctgagccgagctcttctacctttctcttctgcagccgcgcaagcaaggtgctcgtcaacgagggcttctatgtgcgtgccgccttcatcgctcgctcacaatccctgtgctggtagccaacgcttatcgcgttgacctgcggcatgcccttcttgcctccaccgctctctctgcgctgcctcgccgcctctgttcctcccctttcaggaattctggaactggttcgacccgacagcatggtatccgctcggtcgtgtcgtcggcggcacggtctacccgggcctgatggcgacggctggcgtcatctggaatgcgcttcggctcgtcaacctcgaggtcgacatccgcaacgtctgcgtcatgatggcgcccgctttctcgggcctcaccgcctggagcacatacctgtgggtcctcaggccttcatcataacgatactgccctcagtgactgacgctcatgcccccgggcgccatgcagcttcacgaacgagctcgagccgaagggccagtacgcggccggcctgctggccgccgccttcattggtctcgctcctggctacatctcgcgatccgtcgccggctcgtacgacaatgaggcgatcgctattttcctcctcatgttcaccttctacctctggcttcgggcgctccggaccggctcggccctttggggaacacttgccgcactcttctatggctacatggtcgccgcctggggcggctacgtcttcatcaccaacagtgcgtcgagccaccagcgagactctcggagtctcgcgcgcatgctgacacgaaatgcactctcccagtgctcccactgcacgcctttgtgctcgtccttatgggccgcttcacgcagcgcctctatgtcgcctactcgtcctggtacctcatcggcacgctcgcctcgatgcaggtcccgttcgtcggcttcctcccgctcaagacgtcggagcacatggccgccctcggcgtctttggtctcctccagctcgtctcgtttgtgacgctcgtccgggcgcacctgccgtccaagcagttccagacgctcctcaccgtctttgtcgtcggcgtcttcctcgccgcctttggcgcgctcgtcggcctgacgatgacgcagaagattgcgccctggacgggccgcttctacagcttgtgggacaccggctatgcgaaaatccacagtgcggctctctgtctctcgcatcgacctcttgctgcctccgtctgcgactgacgaaccttgcctcacgccagtcccgatcatcgcctcggtctcggagcatcagccgaccgcctggccgtccttcttctttgacctccagatgatgatcttcatcttcccggccggcatcttcctctgcttccagaaactcaccgacggccacgtctttgtcataatctacgccgtcctcgcgtcctactttgccggcgtcatggtccgcctggtgcgtctctcttctacgcgttcctcagctctatagcttcgccggctgacttgctcctcctggccaccactcgcccccgcagatgctgacgctgacgcccgtcgtctgcgtcgctgccgcgctcgcgacgtctaagctgctcaagacgtacctcgacccgtacacgcccgacccggccgaggaccgcctgctcagcgccgctagccagctcgaggacgagacgaagcctgcgacgtcttcgacagacacgacggccgtcacgagcgcgctcgccagtgggagctcgacctcgacgaccaaaaagtccaagaagaaggccgcggccgaggcggctgctaccgtcggcgccgccggcccgctgacgacgacggccgacggcgaggttgtcaaggagcttcatcccgaggccgagctttctaccgctggctcgaccagcaagcgctcggcttcggccaaggcccagcggaacggcatctttggcgccggcccgcgggtgctcgtcgcggttaacgtgctcggcatgctctgcctgtttgtcctccactgtacctgggtcacgtccaacgcctactcgtcgccctcggtcgtcctctcgacccgcaacaacgacggcagccaaaacatcatcgacgacttccgcgaggcctactactggctccgcatgaacaccgagcccgacgccgtcgtcgcctcatggtgggactacggctaccagattgccggcatggccgaccggccgacgctcgtcgacaacaacacgtggaacaacagtcagttgttctcgctccgtccgctcaaaacgttcgctcaccttcatcccgctcgcagctcacattgccaccgtcggcaaggccatgtcgtcgtccgaagaagtctcgtacccgatcctcaagaagcacgacgtctcctacgtcctcgtcatttttggcggcctccttggttactcagggtgcgtcgtccctcgtgccgccttctacgcgtcgcccgtcttctgctgactcctccctctgctcatcaaatgcagcgacgacatcaacaagttcctctggatggtccgcatcgcccagggcgtctggcccgaggagatccaggagcgcaattactttacgccgcgcggcgagtacaaggtcgacggtcaagcgtgcgtcgtctccccttcggtccccactctagcggcccgacgctgactttctcgcgtattccatccctcctgctcgtcgacagcacaaaggccatgaaggagagtctgatgtacaagatgtcgtacttccgtttccccgagctctttggcggccagcggacggtcgaccgcgtccggcaccaggacatccccgagtcgccgacgctcgacgtcctcgaagaggccttcacgaccgagaactggatcgtgcgtcgtcgcccgctgcgttcgctccttcacactcgcaggctgacgaccacccccccccccctttccaggtccgcatctacaaggtcaaggacctcgacgcgctcggccgcaagcacaaggccgtcaccgcctttgagtcgggcaagcggctcaagcacctgccagtcgtggccgcgccggcaagcgcaaagaagcggcgggcgtagtggagaggggcgcagctggctgcctccccctttttgctttcgcttccgcctcgcaaaagcttcatggacgaatgaagccttgtctcgagagatcgcattctgctgtgctgcctccgatctggtccgccgtcacgagcgcacgacagcctcgtcaggacggggacggggtcgtggcctcatacaccgcccttctgcacccgatccccgcctcgcaggcgcaggtctcagccacagcgccatcagctgccttgctttttattgctcgtgcgaagtctcccccgcgccgtgagtcaaatcggaacggccagcgccggcccgttgaagcatgaggcctcctcctgctaaggaggaatccgccggacgctcgtccgacgcgcgcgcgccaggcacagccgaccgcctctcccctttcctccgcccccttccgaccgctccctcacctctcgacggacctggacagagctgatctttgagggctgacctcacttcgcccgtagctttccaggcatgccgtcttgagtggtgagggtgccagactcggcgtctcgtctgacctcctcccgggcggcaggcagcaaccgccttcgacccggagcagcctctacgaaccgttcgcgtccaaaacgagctggccgcacacacgacccgtcctcccccgcaccccgcctcgcttccatggggggcgaaaatccctcaagcagcaggaccacagcccggtcgacaccgctcgtcgttgcccgtgcatgaactcgctcactcgcgcaggcggccgggccgaaagtagccacagccccggtggtggccgacccaacccgaacctgccgccccgcgtaaaggggttcccaggggttccaaagcccgatcgcgccggccgcgcagtcgaatcgctcgtgcccccgtgaccacatctcgtaaccctaggggcccgcctgctgctcgcccctacaagatggctaggtccatctcgcttctggccttcttcccttcgagcaacatcgcggcccccctcagcgaccatctaagtcggtcctgcctgcctgctggcctgcctcgccctctgcccacagcaggcagcagtgcgctaacctcgtcctgcctcccgaccatcgacagccaccctcaccagccagccagccacccaaccacaggccttgccgcccatctcaccgcagcatccagcaagatgacctccttcacctccaactcgtcgttcggcggccggtcctccttctctgagggctccgacctctcgacctcgcccaacttctcgcgcatgactaaattcgccgaacaccgcgatcaggctggcccgccggcggccgacgacgacgagggcgcgctcacgcacccggtcctctcgagtttcaaccgcgacgtcgtcgttgcaggcgactttggtctcgccaagatgcaggtgcgtcgctagtgggcaaggatgcgttggcggtaggtcgctgacctttgtgcatcgccacctctctgactcacgcccccttctcgcatcacttgccggtttggatcactctagaccaaagctcagtgggaggcgcagatgaagaagtttgatgctcaggacgcgaagcaggtgcgattggttttctctctcatcatctctgtcattcgctgaggctcgactgtcgcgccctcaggccaagaaggatgctcgcaaggtacgtcttccactacacactatctcagcgcacattgcctcgcctcgggggggctgaccacgactcctttgtcgttttacaggctaagcacacaaagaagatcgagatcccccagaccaaggccatgaagaaggccaagaagcacatggacgtcctcgactcgggagacgaggacgcctagtcggccagcctcgagctgggtgcgtcctctctttttcttcgcccacgatctggatcgacctgctgactttttgctcgcttcctccttagcccgggatgactcactgtgactggcgcacggcccttctgtacaacctctcttccactttttctctctttctctcagaccgaccgtgcttcacgacctgtgcttgttgtaccctgatcctcaacgaccgacgaccccctgaatccttttgtagccccccccccccttcatgtcctcttccactcttgatcgatgactcctctttcacagttggctcgggcgagggggacatcctgcccggcgacaacaccagcccgcatcttgcaacaaaaaattgcacgagactgcccgtcatcctgcgactttgagtgcctgcggcgtcctctcgcgcgtacgaacgcattgtaccacagacgactgctcctcgtcccttcccttctctatgacgacgacgccgttgttgcaacgtctgtcgcggcggcctgtcgtttcaccgcccgcagccggtcgccctcgcgcagcgcccgtggccggatccggtcgagcgcatgcggccgggacgagatgccccttggcagctcgatctcgacaaagtcggcgtcgctcgctgctgatggcgatgcttcggcgagggagagggcggcgagggccgtgctcgggtcggaggacgagccgtcgctgatggcgggccggtcggccggacgagaggcttgggaggtgggagcaggagggttaagcgagcgcgagaggtcgaggtacgcatggagcgaggaccggatcgtgtcacgcaggcgggtcgtctcggtgcttagcaggtgcgacggcacgttgagctgtagatgagccgatggcgtcgcaggcgagtgtggggagaaggcgaggggcgacagtcagcactccgctcagccgcatgcgagacgctggtgagccaaacagcgacagcggcgcacgacgatcgcctagacgaccgaggcgaaggctgcgccaacccaacagctacgagagtacgcacgaggtagttgtcaaagccgccgtagcgcttgatctcgcgcagggccttggtcgtcgtctgcatgcggaagccggcgccgaggacatccgagtggtggacgagccgcttaacgttcggcctgaagcgccgagacgagtagtaggtgtggtccttgttgttggtgttgatgttggtacctgagctcgcatgagcaggagcggagagaggcgagagcaggagagggtgcagaggcggagcgtcagccggtccgtcttcgcgagagaaaggcacgcttcgagcgagaagggcgaggcgggatcgcggacttctgcatgacaggccacttgtgcgaccggtcatgcagctcctcgtctacaagagacgcgttcgacgccatgccgactccggtcgacaagcagcccgcgacctctgagctcgagctcgatagactctcccgcctgctgctgccctcgaatctcctcagaagacgagcgacgcaccggtcgagatgacggcaccgtggtagactccggtaagcgaccgctgaggcacgcgaccgccccgccggtgggtgtagtccctgggcagcgggtcgaggacggcgagcgtccgctgggcgagcgacttcttgcggtagagcttgcggacctcgaacagggcctcggtcgggcgcatggcaggcgagcgaaaagcaagggggggagggctgctgagacgctgtgtgttgtctgtgctgcgatgcaaagctgcaaggaaggacggcgtcgggtgcgagggtggcaggagagagggagagagacagagacggagagccggacgacgagtcggccgggcaggcgtggcaggacacaagcccaagtcgggcaaaaggagcccccaactcgcagcagccccacacgcacgcgacaaccgacgcctgttcgaccagccccgctcctcgaccttctcgctcgccatcattgacactccaagccggatgcgccccggcgtgctgcccccagatggcggcgagagcagcgacgatgagcccatcatcatcagttttggtccgaccttcgacaaggactgcaagctgcccgccttcaagaagcgcaagttgaacaccggcagcaagcctattcaggagccggctgccgttcctacgcaggagatcgcaccgccgctggacggcacgctggcctcgctccaaagcgggcccttgtctgcctcgccgccatcggcttccacgggcccgctagctgctgcggtcgacgagcccgccgacgaggagcctaccgccgcagcagagcccgcctctgtcgcatcgcctgatgctgcgctggctgcagatcccgaagcagtcgaacacggccaggcatcctcggtagcagcagcggctcccgtcgcgccacccgtcggctactccgatctgaaccggccgcgccgtcagaccgcacgctacgcggccgaccgagctctcgcagagctcaaggccacccgggccaagcgagcagtagccgctacgactgcctctgccgccgctcgctctccctcgccttcgccgccgccgccggtcgaggttcggccatatgttcggccggaggacccatcggtcggcaagctgccggctgagctgctcgcgctgctcgttgcggccggcggacccctcgcgagcgacgcggcggacccacctgacgacgtccggacggcggtcatccccttgcttcggggcttgctgtttggcgtcaagcctgcgctggctcggctggccgcttgggacgccggctgggaggacgctgctacccagcggcggatcgagcgcgccaagagccgcttcatcaggggcctctgcgtcctcggtcggggcgaggcggtcgattgggccggcaggggggcgtacggccttccgtgggaagatacgctgtgtctctgggttcgccgtgttgcctcgcgtcgtgtcagaggagggagggagactgacgagcccttcccgtcccgcagcacatccactcgacgatcgtccttggtttgccctcggccaatccggtctggcagctcatcgaccgctacacggccctcaacccgaacgatgtcctctcgccgggtgccgatccggcgaccgagcgtggggccgagctcgtccgtcagcggtgggctgcgaaaggccggctgcgcgagattgcgctcggctggctggcagcggcggaggcgtacaaggagccctaccgcttccagcatgctgcgtgagtcggcctctctctgctcgttgcacggaggccttgacgagctgaccgaccttgcccggcgactgctacagctacctcgacctcctgcgctcgcacctcctcgtcctccccccagaacgagaccaaccgcccgcaaccgacggcacgctcccgcacgctgttgtcctcgagccgccggcaacctggcctgctctccggtcggcgctggccacttgggcgcacgaggcggcggcgctatgtgcagagctcggactgatcgaccgcgacaagcaggcgctcgacggctggggttaagtctagggtgatctgcgttggtcttcatcaccctcagccgtcgacaggagcaccttcgcccgaatcatcgaagttggtggcaagaggagatgggcggcgagcaaagaaaggggctttcctccttcgatcgctctgcggagcgaccggccgaacggagctcgcgctgggcagctcgcctcgcatcccgctcgatcatgacccacgccgggctcgacccagcctcctctttcagcccggccgcatacagacctcgcacgagcagtctgccagctccagctcgacgccttcaacagctagccgcgacccccccttggatacgctcgacaacgacgcccggtcggacctcgcccgccgctcggatcctcctctcctcagccggctcgaaacttgcgtgcctgcgtctcatcttcgccccccgcctctgtatcacgctgaaggtgcgtcagggttgaaaccacgacggcatcgcccagcatcgcagtcgctgaccagccgagcgatccattgacacgtccgcagcgcgtcgtggattccgcccctgtcttccctactcgagctcactcagctcaaacgcccgtctcttcgtcatgcactcgctctcttccctacagggccgattcttccaccggaacgaccggatggccgtctctttcatctcgcccgtcaagcgcaaggtcggtcgcaaacagggcagcaagctcaagagggtgtttgacgagtcggtcggccggtggcggacaaaggtctacacgcccgagatgctggccgctctggcggcggcaaaggacgagccggcggcctccaggagcggaccggccgtcttcgagtcggaggaggaggaggaggacgatgagggctcggacaacgagctcggcatgtcctcctcgtcctcggcccctgtccagccatcgatgccttcgtcgccggccggctcgctcgtcgtctgcgaagaggccggatcctcattttcgctcggcggctcagcgccagctccggccactcagcatggattccccaaaatcaagttcactgtcaaggagtcgctcggctggtcgccggcctcgccgctcatcatgggcagcacggcgtcgtcatcgtcgacccttgtccagaagccgaccaagcgccgccggatgtccccgcccgagatgaccgacgccttcacgacccctcggcagtcattacgaggcagccgaatcggcgccagcgttccaccacctgctcctcgccgcccttcgtcgtctcagcatgcggcccgacgccctgctccggtcacgcggaccgtcaagcgaccctcggccgccgtcgggcaccccgccaagcagcagctggtcaaggtccggtctccctcgccatcaccctcagccgtctccagcgcggcctcggagctcatcgtcgtcgaggaggacacgtcggcgacgccagcgacttgggtcccgcccgaggcgagccctccgccaacttacgccagcggcaagctcacgttccatcgggccgctccgccgtcggatgacagcagcagcagcagcagcggtgaggacgacgacgagagcgagcaggccgcgtcgcacgactacgcctcatctgacgactatgcggccgacatgctcgaggatccggcgcagttcgcgctcgactggaacgacgcgtcggtcccgccgctgcctcttccggtcgatccggcgccggcagagcgtacacagcagcaggtcccgacgacagacgagtggcagaagggccagtgggccctgcctcgtcgccccgtcgaccagtctccgcaggctcagatcgactggaacggctcgtacggtaccgtttcgcagcctgtggtcgaaggcgtctgcgaccagcagagaccgccgatatcccagttcaacgcaccgcacgcgcccgatggctcgcgagacggccttggcttctgaccagggcgggcgatgaatacccaggcaggcgtgcagtctctcgtcgaccaacggcaagagttggaacagtcgtcttcaccgccgtcaccgccatctcagacaccgacggtcgccggaccgagtggctcctccggcagtgacctatcgtcccatgccctcggccgttctcatccggtgcccgaccctcaactcgacgctggcctgatcgaatcgctggagcagacgttcgcggccgtggttgagaagcttgggtcggctcagatggccgacgtgccgttcgagatcatcgacgagcttgaggagatcgagcgctcagtcactgtcgtctggcgcgtgtggaaggtcctcgctcgggctgctcgcgaccggggcgatggcgaggcgctacccgggggcgagattgccgagccgctcgataggatccgcttctgggtgcgctgcgcttcgcagactctgcccttccgctctcgatgccctccactgacatcccttccgatcttcttgtgtcgccgttcagcacctgacgcagtcggcgctcgtcgccgacctgtctgatcgcgagcgcatccaccacttgctcgagcgctactacgccccgaccgagacgaactccgacaagctcgggcccgacggccgcattgcgctcggcaaggccgactaccggactctcagcatgctcgtcacaacgctttacacgtacgagctcggccgcgaggtgcccggcaggtgcatcccctctgcccgcgcactttgcgaagccaggctggctgacccaaacttccccttgccgcggcagcatcggctccgacatctacgccattcggcgactcggccgcctgcatcttgagcgcaagggcgaacccaggatcccaccgccagacaagatcgcctggccgcgactcggccgcgacatggtcgagcgcgcacgcgtcgtcctcgcactcctgccgtcgacagaggcccgatcgccctcgccaaagcaaccgccggccgagccgcccgccacccggtctgcatcgcagtcgatggacctcgacttccttctcggcagccccgacaagaacgagccggacgccaactggtcgggcagcgaaggcgatctcagcggcgcgacgctcgtcccctcggacgcgccctcggccgttccgccgaagtgtgcgctcgcaggcacccatcattgcgccgagcagcgcgagccgagtcctctcacgcattacctcggctacgacaccgtcaatgactggtcttttgacacctacggcaaatcatgggccagcggcgacgatgacttgggcggtctctttcagtcatgatcgaccctcctcctggccacaacctctatgacatctgtccagcttgctccatcctcgtccgcttcccgcagtatcagtcatgtctttcctcatccgtcgaatgcacttttcgaagagcgcaacgtctcgtctcgcccgcagcgcgctcaccggtcggagagaaagacgggcgcgtcgagccgctccagcgactcgaccgactcgaccgaccaccgtcttctcgactcgcccctcgcccacccctttgcctctctcgccctttgtccccttgccaaatggtgcgtcgctgtcgagctgcaggccacaatattcggacggcctgacgctgacctggctctaccatgcttgtcccgcgctgtggctcctgttgcctgctcctcctgtcaacctcgccctcacgcaacaacgctgtcgtccccttcggtctccccgaaccttgcctccggtcgtccctgctcttgcctctctctcgtcgactataaccgcgtcttcgatccggtagtctgcttgtgcgtctctctgtgaatgctcgggcgaagcgccgctcgcagctcgcctaagctcagctcgctcgcgctggcttccccttgatgctcgcccgctgacgatcaaacgacttctttcttcctcctttgaccgacccttgacgccgtgctcctaaccaacctgctcgcactgcttcggctgccgtcttgctaaaccaccttcgtccgccttctttgctttcggcccgctcttcggccgctccgctgtttgcccaccagctcccgcccaggtccgcgaggccttctcgctctttgacaagcgcggcacgtcgcacatccctcgctcgcagctcggcgacctccttcgtgcgctcggccaaaacccgactcaggcgcaggtccaggagctcagcagctcggtcagcgatgaaggtgcgtcgctccttcgtccggctcgagcgctcgtcggctgcgcagctggcgggcatcgacagaccagctgctcaactttgatggtagagcctgacctgctcttctctgtgattattccagtgaccctcgaggagttcgagcgcgtgctcaaccggccaggaggatgggagcctgcgggcacggtcggtacgtcgggcttttctggacggccctgcccgtcggtcgaccgagatttctgacctcagcgtgaatgctgatgcccattgatcttgctccatcgcttccttgctctgctgatgcgtgtccgtctcagccgagttcctcaaggcgttcaaggtgtttgacaaggaggacagcggttacattgccgtcggcgagatcaagtacatcctgacgcagctcggcgagcggatggatgaaggcgaggttgaggaggtgctcaagatggccgacgttgggcccgacggccaggtcaactacgaggtgcgtctcgatggtcggatgcagctggtcggtggcggaggctcacctttgtctgtccacgtctcgctcaacacacaggccttcatcaagtcggtccttgccgcctagaggcctcttggactctctgcttcctccttcgcccttcgctttgcttcgcttcgtcatcggctcggccgcttcccttcttcgcaccctcgctaccttttttggcgcacacggactcttcctctcaccaccccatccggcctctgcgcgcctctctgatacctctgctttgtcggccgacctcaggacagaggtcctggagcatgcttctatccgtctgcatgcgcgaggaccgtcggtcgtgcgagggtcgccggtccacacgttaggggctagccggcgaaattagacccagagacgagagcgaccacgtctgtcgtcaggctgctttcaatcgttcgcacttgagatatcacagaggagcgagcgaactctttgatccggtcgcggcgcactgctgatacttaattgcacgagcggacgcacgcggccgtcgccccgtcggtcaagtccttcagccgcgccgccacgagcagcactcagggccgcccaacgtgctctccccctcccctcgacaacatcccatcgcaagtcggcagccatgctgttctaacaccccctgctcgtcgccgctctcgtctccaccctctagcttgtcgctgtcgccgttgcgactgccgcgacccgcatcgccgccgtcgtcgtcctcggacgctcgctcccccggctccgccgaccctccctctcgcctcagttgcctctgatgtcggccgccctaccgctcccacgagctcggccgcgtctgcctgtcgcctcgtcgtcgacgcggtctgctgctccagctcgccggcatgtcgccttctcaggtgaccggagcccacgaggcgccgagtcgccgtcggcgacttcgagccttggcaggcgaggcgtcaaggacttcgtctctggccacatcccatctggtcagtcctctgaggagcttgtgcggagcaggactcctcgctaacgagcattctatacccatgatcaccaggtgcgaccgtgcggtatccgctgaattcgaagaacgtgagtccgagccgacgccacctgagctgaggaggtcagccgacgcgcgcgtagggcgcgacgtcgttgacgctgccactcacttgtgtcgagagcgcagctggctgacgatctcccttgctgcccctacgactttcctcgaccgacctggtttctcttcttctcctgctttcgtgtcgaactgcccccccccctcctgcccctcactaccgctgccgctcggctccgaacgcacttgcgcatatctcagatcctcggcgttcaccagtcgcgcgggactcggccgacgctcgaggacgcctactcgttctcggcgctctcgctccctccttcgctcctccagtcgtcgctccgctccgagccgcccgcagcgccccactcgctttcgtcctgggagggcggcatccggacaggcggcgcccggggctgggaggccaggtcggcgcatgcgggcgaggttctcgccgtcggcctctacgatggtcacggcggccagagcgtcagcaagtggctcgctggcagtctcgcaaaggagatggagaagggcctcagcctcgaggagggcgagctcgagagtgcagaggcctcacgccagacgtggaaggacattgtcgaggtcgtcgacttcttccgcagcgtcggcggctacttccggcgctgggagggcggtgcgtgcttctctgtcgaccgcccgtctgctcgcttaggcgactgacacgctgtccttcgtcaaacaggcatcctggcccctcgctaccggcagtcgctctcgggacccccaacgccgttaacgctgccagaacgcctgacgctagcctttctcaaggtcggtcactgaggccgcgcgcgcagtctcgggcgcctccactgatcaccttgttcatacctgctcttgcaggccgacaagcacctgatgcagaacctgcaagactcgcaggtttgcggctcgaccgcgtcggtcctgctcctgcactcgctctcgaccggcgactcacagccgttctttgcggcgccgacgctctcgctcacggtcgcccacgtcggcgacacgcgcatcctcttgacgacgaccgacgggacgactgaggctctgaccgagtctcatcatgccgacgcccgggtggagcttgctcgcctgcggcggcttgccggccggacgggctctgtcgtcgacgcctttggcgagacgcgctggatgggcgccgtcgagaacacgcgggctctcggcgacggacgctggaagaaggacggcgtcacggccgagccccagatctcgagccgcgtcatcgacggtcagttgagacgtgctcgtgatacgatcgcgttgccgccgctgaccatgctcgcgcctcttctctggcaggcaactcgaatgcctacctgacacttgtcacgttagtcctgtcgtttacgctcacccccaatccagtctcttcgctgaccatcgaccgatccccgtccgcttgcagcgacggcgtctcgtcccagatgtcggaccaggagatatcggacatggcgcagacggcaccgacgccgtatctcgcggcgcggtcaattgtctcgttcgccgaagacattggcgggtccgacaattgctcagccgtcgtcgtccctctcgccggctgggtcaagcgtgagggggtcgacaggacgcgcgagcggcgcgagtggcggcgcaaggaggtcgagggcatgtcgagcaagctcgtccgccgctagatggcgaaggcttgccttcgactgtataccacgaagaggccgcgagatctcggagccatctatcgtccacgatctgatgtacatcagcacgagctcaaccgtgtctgacggcgttcgctatgctgcgaacaagccttccctcgggcagtcccctggccaagcccccctcgcctctcaaccccaacattcattgcccgaccggcaactggagctagaggtcgtcatggcattagatgaagtctagtctgtctatgagtggagggcctcgttgggcgtgtttgagcttgggcgataaagcaaagcgcgactacaaaagattgggacgagaaaaggtaggccggcgagaggaaggacgagagagacacagcgaatccggagtgcgaaggggcgagagggagggccgaagagggtgaaggacgaacgaagggtgccggcacgaagctgcttagaagatgacgtcgacgaagcgctgccagaaggaccggggcccgcggttggcctccttgatcgcctcggcctcgtcgagctcgtcaaactcgcggcggccggagacgaaatccatgtcgtcgagagtgacgtgcctttgtgttggaggggaaaggcgggaggtcagcgcgtgaccctggacggacgaacgagcgggcgaagggacgcacttggtgaaggcaaagatctggccgcgacgggtccgcttgccgccaaagcacttccagccgccccagaagacaaagacgccgatgaggccaatgtaggcggcgataaagtccgaggcggtgaagttgtcgccgatgaaaacgtggaagccgttgaatagggcgacgagcgagataaaaacgagggcgatccagctcgcatagggctggaagggcgccttgtaagggagatcgttccggtcgaggccctggtgccgcatgccgtagtaaaagcggaggtaggtcatcaggatgatggcccacgcgacgatgccggtgatggtcgaaatgttatagagcctgtgaggaagacaaggctgtcaggacagcatcgtgagacgcaagcgcatcaccgggcgcgtaccagttgaagacctcgttggcaccggcgttgccgagcgtcatgaacgagagcgcgccgaaagcgacggcggtgatcgagacgcagtagacgggcagaccgcgcgcagtgcaccgccgaaggaatgacggggccttgccctcgagcgagagcgcgtagagaacacgggacgcggcgtaaacgtccgagttgccggccgaccagacggcgattaggaggacggcgtttacgactgacgagaggcccgagacgccggcattgttaatagcgatgacgaagggcgactgcgagacggtggcgacgtccgagtcgagcaagcgctcgtccgtgtaggcaacgagaatgccgatgacaaagatcgacaggacgtagaagatgaggatcctgaaaggatgcaggcgcgagcttcagcataggcgaccaagcctgaggctggggtagaggtcgactgaccgccagaaggtccggcgaatggccttgggcacgttcttgcgcgggttctcggcctcaccggccgtcagggcgacaatctcggtgccgaggaacgagaaggcggccgtgacgaaagccgaccagaaggcaacgaactgaccccagcggccgtcgacggtgacgccaccggtcgagtactgggcaaacggtccggggtccttccagtctgaaggcgacggcaaaggcggggcagggcgtcagtcaaaagcttcacggaagagaagaggcgaggggacgcacagcggaagccaatgtagccactgtgagccgggccggcgccgcagttgaaggcaatgcccatgatgatgaagccgacgatggcggtgatcttgagggccgaggtccagtattcgatctcgccgtaccttcataaagcgaaaacaagcatgtcagcatcggccctcgtaggtgagaagctggtctcgacggaccagcgaacgccagcgaggttgatgacgatcatcgtgatccagagcggggtgatgtaggcggccgcgctcgttgtcggatcccagtacgagatgaggagcgagccggcgacgagctcgaccggaatcgtgatggcccacgaccagtagtaattctatgggtgaggatagaccacggtcagttcagcttggagctcttgcagggagggaacagccgagacgcacccaaccgatggcaaagccgaacgcagggtcgaggaagcgagtggcggcgccggtgaaacctccgttgttggggaagagagtcgtcatctctccgagagcgatcatgatgaggtagacgaccgtgccctggaaggacagaaggcggcgagtcagtcgcaggccttgacacgggcgcccgagtacaagccggccgcgcaccatgacgatataggcgagcaggcagccgatcggtcctgcgctagcaagagccgtccctgatccgacaaagagcccagttctatacaaagagaacgagccgagtcagtcgtccgctaacacgcacatgaccggcggcgcccgacgcacccgatcgtgcctccgagggctgagacgggaggaaaaggcagagacgtcagcaagccgaacacggcgcacagaaggcgggcttcaggccgcaccaatcatcgctggacaggggggcgataggcaagagtgtcggtcagcgccaggcttgacgaggtggcaggcagcacgcaagagaaggtggtggggccaagcaaaggagggacgcaccaaggtgccgcgacttaaggttgcgctgcgtgccgtgcgggaggtccatgagctcatctaaagccagcaagccaatttgtcagacctgagtcggcgtcgtacaggcaggtcacaagctgctagggagggaggcaagggggaacgaaggggcagacgcaccggcacgagcgacctcgcccgtcgccgcctcgctgccgtcgcccttctcgagctcggcatccaatgacgagagcgacttgcgcttgtgagcgccgacctgggaggacgagagctcaatggagtttgagcggtccatcttgaagcgtaaggtagggtggggggtgagaggacgaggacgacgaggacgacgaggacggaaaacgcggagcggcggcgcgagcccggggcagattcacacgcgcgcagcagcccgaagtcgaatgctttaatagccgcgctcccttcgtcgccaggtagtgtcgctatccctgcaccccgacgcgaccgccttgagcgagcgggtcctggcgcccgtccgagcgagggttcttgaccagaggactgccctgatgctgaggttggcgaggcaagacggaccagacttcatgcggccgcacgacgccgacgccgacgttttggagtcagagagccagctcgatcgcccttttcgcctatctctcggccgcggcgtgccgaccggcgaccaacgggctggcgcggcgggcgccttcgacgacggcgctgctgggcagacgaccgaccacaagatatccattctacaatcgcgtcgcgcatgacctctacgagcgcgagctgaacctgtcggcgagctcgtcgtcatccgacacgactggccggtagccagcttcttcggcgtcgaccgcggcgtcgccggttgccgagcctgcacgcgtcatgtcccagacgaggacggcaaacgacgaggcgacgaggatgccgccgaggatgacgaccggcgagatctgcaggagcggcggatgagcttgtcaggataaagacgaagtctcggctgttccttcgagacttactgcggccgagtcgtcagacgagtggatgacggcgtccgagatggcgatgaggatgatggtgagtaggttgccaacagaggctgagaaggaggagcaaggcgagtcagcgagagcacaccggcagcgtctgtgatgcgccgagatgtaacgcaccgacgaccgggccccagagcgagaggcagatcatgaaagcgccgttgtacaggacgccgagcgagccgcagagggtgacggccagcgttagaccgagcggcgtgccctcggttgctgaccggctggcggcgaagctccagggcgactcaaactcttcgaggccggcaaagtggaggatcgggaagacggggagcaggattccgatggtgcagatgccgatgagcgacgtgatgaggttaggatatagggcgaaaggcaagacgggcggctgggctgagcccggcgacgtcttcacgtggttgagcgcgatccactttttgtagccgacctcgtagatgccgtacctgcgtagtgcggagagggtcagcagtgtgagcatgcgaagaggtcgagcagcagacgcacgctgccgccccagcaagtgcgagagcgtcgccgagaagccggaagttgcccgccgcctcagcattggcgctgtcagagccgccataagcgacgacggtgacgcccacggtggcaagaccgacagcgatgagcttgcgggccgcccactgctcgccgaggagcgcgactgcaaacaggaaggcgaagagagcggaggtgttgaagatcgtggtgatggaggtcatactgcgcggcacggagagagggacgtgttcagcgtcttcgctttagcatccgctgacgaacgacgagcagggcgcatgaaggaaaggtgagaaagcactctgtcaaaggaacgcagaggtagaagagggcggccggcgcggtgacgccgagcgtcaggaggaggatcgccagcgaccctcgctcccagggccaggccttgtccggcgcgtcgggccgaccgaagggcagagcatcgacttgccgccgggcgacctgcgcgagggtgcgaaggaccggccgaaggggctcgtccgagcgcaggcggaggaaggcgaggtggaccggaagcatccagaggaaggaagcatgcgacaggaagagcaggaggagcggcttgcggtagtctgtacccgaaagggcaggagtcgatgagcacgccgagactcccctcaagacaggtcgacaggcaatacgaacgtcgggtcgcctggacatactgcaggatggaggatgatgagaaacggatcagtctgacggctgtgctagctaggacgcgtccgagagcgcccaactaacctgcgtgagctcgctctgggtgacataggccgtcagagagacgagaaagatgaggacggcctttggtccgcctggaatcctcgactgcgacttgctgtcgcccatccttgaggagatgctgggtgtcaggtcgcaactggcggtcggaggcgggggcacgcgacagggcaacgaacctcagccgagccctccacagtcactccaagctccctacctccaatcgcttcgggcaacgagcactcgatgtcgctcttcctccgctcggtcggccggctcgcgacctttacgcagacggtcgtcggcctgccgctcgtgctcgacctgctcggcgagcggtcgttcctcctgctctcgctcttcttaaccgcctaccagacgacctactcgactctctacctcgcctgcaaaaacactagaggtgctggcatcgtctcggtcctcggcgttctcggctcgtttgtgaccggcctgcttgtcgtcttgaccttcgtaagtgggccatctccccccagcgttgacaccggtcgctgacgcctgctgctcctttgaccatcgcagtacctgcacgtccacccgccgcaaccgccgtcgacgacgcacttcctgcactcgttcctgccgcctctctggtcatccttccttcgctattcgtcgccactgtttacgcttctcgagggcatctcgtccctgctcgtcatccaggcgctcggtcggacgacgcgcagctggatcgagcagggcgaacgcgagggcaaggatatccgtggcgtagtgacgctcgtcggagcgagcagcgtctatgtctgctccgtctttgcgctggtcgaggtgtgtctgtgattcgccgggggtcggttgtatgcgcccacaagctgactgcatgcccttccttcttccccgcttgcagacgttccccccaccgcctctctcgtcgccctatccgccgttcctcctcggcctgacactggcgaccaccttctttctcacgttgatcggcttccgtcttcgccggacgaccgttatcgagacatcgctcgtcctggcctacattgcctggtcggtctggctcgtcggcgccgagggcggctgggggcccgagcggtcagaggacgtcggcgacggctggggcaagggctggcttgccggcaacggctgggcgccagacgagtgggaccggggtgaccgcggcgacggcgagctcggcgacctgcttagctacggcctgcgaagcgtgcctggcgtcgtcactggcctgtgagtgcgatcgatctcgttgctctcgtgcctcggctgacccgagcaattcttttcagcgttgcctcccttccgctaccgctcctgatcgcgctcatctaccgcatcacggtccttcatgcggcctcgcgcatcatcatcttcatccggaagcgcacgaccggctgggaggagcccacccggtcggcgacgtcgcccatcgcagcaggcgagtcggaggcgactcgcggcgtcttctggaacggccaaaagctgtcggaagagcctccggtacgtcgttctccaggaccgccgcccgattgaaggatgctgacccccccggggggaaggggggttggtataaagggggggaggggggggggggtcgctctcgtccggaccagcggacgacgagtgacagggagttgggttccagtgtgatgatgcgcgcgacagtccaagagccagcaaagacagtgaggcgacaagcagagtgagttcgtgaggtaaggaagaatgcttcatgacgaggccatgatgtgcgaattgaagttgtctgcaagagcgggagggagcgtcagcccggacccgccaggtctgaatcggacgagggacacgcacagatcgcggggttgccgttgaaggtaaagttgggcgacaggctgacgacgtcggcgccgttgcgcgaaatcttggccgacatgccgccgccgggggcgagcgcatactggagccgggtgacgccggcgttgaccgagaacgactgcgagcccgcgcccgacgtgagcgtgacggagctcggggcggtcgcaaagatcagcgcgtagaagttgtcctgcgagtgctcgcggccggttggcgggccgaccgagtcagcgttggcgttggccatggccgggtggggccgggccatcaggaagaccttgtcctgggtgatggtcgggtacgagcccgtcttgaacgcggcgctgtagtaggcgttgatctggccgagggcggtgtggtcaaagccgtcaacccaagactgcgagttgggctgggcgccgtcgatcgggccgatgtacgacgactcgccgtagtctgcaatgattgaaaggaaggtcagagccgaattcgggagtcttgcgctcacgccgacgcagcgcaccgttccaagtgagagcttcgacgaggtcgaaccggttgcggttggcgatcagctgctcccagcggtacgagtagagccagttgtcgctgcggaactgccagttcttgttccaagacgacgcgccatagtgggtgtagaaagcaggggcgatggcggccatgtaggccttgccgccgagggcgctcaagtagcgctcatccgacgagaagtcgagctacggggcgaggggagaggactggtcagccgcagcgccggaccagatacaaagccaacgctctcggactcacgtcgccaccaccgctcggccagccagagttccagttgagctcgccgtcgagcgccgaggcgccaaaggtcgacgggtcggtaaagattgacgggaggaagaagatgtcgttgccgccggccttgagcggctgcttgaaggcgccctcccagccagagttccagtcgcccatgccaaatgtgcagtcggtgccggcaaaggtcgagacgagctgccggccctggtagtaagcctgggccgagtggccggcatagctggtgacgtaggccttaagggcgtcggcgtgccagccggccgagcacgcgaggctcgtcatgtcgagcgagaggaacatcttgaaaccggtgcccgaggcggccgcggcctggtaggcgacggcaacctgcctggcctgccagtcctcgtggccgacgttgagcgcaaagccgtcgaaaccggcggccgaggcgagccggatgttgttcatccacgagtcgtacgtgaaagggtaggtgttaccgaccatcatgtgcgcgtagacggccttggcgccgccggacgagggcgctgttgtcggcgaggaggcggcggtcgaagccggcgtggggtcggccgaggcactagcggagggcgcagaagcactgaccgaggtagcctggccaacagcagaagcggaggtcgaagaggtcgagacgggtgcgttgttgccgctgctgctgccaacgatggccgcgagtgccttgttcgagtagatgctgagccgccagccgccgccgcagcggtcattagtgccttcgcacgtccagtcacactcggcgttgtcgacgacccggacgtttgaggcgtcgatctggttgctgcagtagcactgggtcttgacctcgatgccggcgacgctgaagcccctgctctggcagagggccgtgcacgaagcagcggtccagccggcgtcggtccattcagagtagcccttgagcgagcggtcgaacgagtcggtcacacagccctgcgagggccagctcgcagcggcagcggtcgacgtcgtgctcggaggggctgacgtcgtgtcctgagagaccgacgtcgagctcggtacggccgcagcggaggacatggccgatgggtcagacgaagggggagcgacattgttggtcttaaagagcgagatcgaccaccagccaccgcaaggagagccgtctgcaggagaggaaagcgctggtcttagcgaggaccgcgagaggagaagacgacgaggctgggctgaccagagcacttctggttgcaggccagctcgccaatgatgccaccgagcctgacgccagcgtaggccttgagctcattgccgcactatgaaaagaagagacgagaaccggtcagcgactcagaggtccgatgccaagatctactgagactgggaaggcaggacgcacgaagcactggttcgaccctgcgcatattgagagaggtagagaggacgacggtcagcttcggcacgctcagaatcgggtgagaacaaaggtggcggacgcgacgcgtcgtccggccgagccagtgccaagcctcaagcgtgcgcccgactttgcaagctcgcgcgcagcgagagctcttgatgaagaagagaccgactgacactcgacaccgccatacgtgaagccctggtcctggcagctcgagagacacttctggaccgtcatgtcgcccgacgagtactcgagacccgagaggagccgctgcgaggcgtcgagcacgcagccggcgtacgaccagccggccggaacggggtacttggccttcttccgcggcgcgcgagcttcgagctcgtacgacggctcctcgtcgatgacggagacgacgttcggagtggaggtggcctcgatggcagctggcggcggcggcgcaacatcggtcgtcgaggaaggctggacggcggccattcgggcgtggtgacgccgacgagggaggccgggcccggcgtgtccgccccgggcggcggatgcaggcgaggcaaccacggccagcgtggttgccgcgagaagggcgagagaaagcgccgacttcatgctggcgaggaaagggccggatggatagcttccggagggatggatggcaggatgttcgggaggatcgacttgttgagcgacgtgaggttcggagggagcgcgacagccaggccgatgaggaaaggaaggatggagaaggagacgggagggagggtgagagggaggtgtcgcaagagaatttgggaggaggcgggtcgggagagagagaagaaaggaaaggagagttcggcgctgccagggaaggaaggaggaggaggagggacgggtcgaggtcaggagggagaagcccgcaggcccgccgctttggaaagggcgcgcgcgacgagagaaaaagagaaacgcgtcgtcgaacaggggcgggtccgacccgcgacgcgcccgccgatctctcctgctgaatccggcttattcgagccgagtcgtcaagagaggctcgcctggcaagccaactcgtgcagcgaacgagaactgccaaacagcggtcagcaagggcaggagcagggcggcctcggggcccgtgcttcaaggctgcagactgcaggggatgatgacgcctgaccaagtggggcttccatcgaccgcctactggcagcgtgcatgaagttgctgtggagagacggcgacgttgtcactgcctcgggtgaattttgaagcatgactgcaggacggcgcaaaactagcagggggtccgtcattaaaagagcttccgcagacaaaatgattacgattctgaatggagactacacgaattgaacgcgtgaccttatacatgctaagcatacgctctaccaactgagctaaatccccctcgcaggttgttatctggtttcaaacaaaacttgtttatataaaacataagaaagaggttaagttgcacgggagagttagatcgtgagctgcatcggccgaactaatgctctacctctgcctcagtgagtcacttgaagtgcaagaagacagcccgttatcaactgcttgattcacttgcacgaaggcatcacgaagcaatcacgtcgctcgtgcccgcatctcactaattgctagccgtcttcaccacttccttgcgcaagccttttcccttggttcggcaagtcggacctcattcagcactcaagcctctgcgcgagcatccactctccagtcgcagcgatgcggacaacgggaaacacctcgagtgaccgtcttgtgctgcgcatggccctgccaacgacactctactccccccccccccggatcaccgcaaccctcatcacctgctgggcttgcaacctgcttatggtccgctatacacagctccaaaaccgcctatcgtcgacccaacctttgcagttcgtggcctgaccggccgacaaatcagctggggcgatagagcaccgcgcgcagatgagttcgccgagccgacgctccgctctttgactcgcgacgtccacctgcatctcgttccttccttactcctcccttcgacctcctcatcctcgcctccggctaggatgcagcaggccatggcagccgtcagcaggcgtgctcctcagctcgcagcgacgaccctgcccacccgcgagctccagtccaaggtccaggtaagccgctcaaggcccgtctccctcctatcgcgcgctttgagccccctgaccaattctccttctcaggccaagctctcgcggctcgatgcggtcgcgccagcgctcgtcgacagctttgcccggcagcacacctacctgcgcatctcgttgacggaacgctgcaacctccgatgcacgtactgcatgcccgaggccggcgtcgccctcacgccgcaggaccggctcctgaccgacggcgaggtcgtcgaggtcgcaaggacctttgtcgacatgggcgtccgcaagatcaggctgacgggcggtgagcctatggtccgaaaaggcatcgtcgacatcgtcggtgcgtctgctcgcgactcgctcgcgttccggcctcgtccggtctgctgctcgttgaggtcttgggctgaccgcgacctcgcctgccccgccctgcaggccagctcggccggctcaagtcgtcaggcctcgagcagctcggcatgacctcaaacggcatttcgcttcaccgcaagctcccggcgctcgttgctgccggcctgacgcatctcaacctctcgatggacacactcgtccccgccaagttccccttcctgacacgccggccagttacctatcacgcggccgtcatgcagtcgctcgaggcggcgctcgcactcgccccgcaaggcctgacgaccaagatcaacgtcgtcgtcatgcgcggcctcaacgaggacgaacttgcgccgtttgtcgagcttacacggcaccagaatgtcatcgtccgcttcattgagtggatgccttttactggtccatcccgcgctctctgtcgcccgaagcttgcagtcggctgacacgcgctgacttcgccccgtccatccaggcaacaagtatagcatcgacaagctttactcgtacgcggacatgctcgcgacgatccgcgctgcacaccctggctttgagcggctcacggccgaggacgacccgaacgatacgactaagcactatgccgtccccggctttgccggcaaagttggcttcatcacgtccatggtgcgtacctcgcctggcgaccgcgcttaccgctcgtccgctgacatcgagtcgcttgcccgagcacagaccgagcacttctgcggcacgtgcaaccgcttgcgcgtgacagccgacggcaacctcaagccctgcctcttctcgccggccgagaccaacctccttcctctcctccgaacgccaatgggcgaggtcaaccgccaagcccagctcgaggctgcgatcggtcgtgcggtcgggtcaaagaagaagggccacgccggggtcgaggctatcgctcaggagagcgccaaggcgggcggccggtcgatgatcctcatcggtgggtagattcctccctcgggtgagtgccgccgcggacctctccctcagcgctcagagaagagaggatggctgaccttttcttgagacgctatgcttgcaggtatgcaggcaaaccgccaccgccgaggttggccggccctgataacccagacgatcggaggaagccgcatgcaactccgagcgatgtcttcctcgccgccctcacctccgccggatttgagcgaccctgaccgggcgaccgaacctcacctgacgcacatgaacccaacgaccggccggccgcacatggtctcgatctcgccaaaggcatcgacctcgcgctcggccacggccagcggtcgcatctttctcgtgcgtcgcccctctttgtctctttgcattgacggcagactaacccattctcatcatcctcccgcactctagcctcaagctgccttcagcctcgtctcccctacctctccttcttcgtccagcaacaagaagggcgacgcgctcgccgtcgcacacctggcgggcatcatggctgccaagcggacgagcgacctcatcccgctttgccaccaaatcaacctgacctcggtcgacgtcgcgttcgagctggagcagattgaagatgcgtcgagggaagccggtggctgggtcaaggtctgcgcgacggcccaatgcgtcggcggcaccggcgtcgaagtgcgcccggcggccctccccttcaccatcacacccgctgaccctctttctcctcgcgaccggtctttgacagatggaagccctgacgtcagtctctgtcgcgcttctgaccgtctgggacatgcttaaggctgttgccggcaaagaaatggtgattgaagacatcaaggtcgttgcaaagagcggcggcaagagcggcgactggcgccgagacccttagcgatccaactctcctgtatcaacatgacgaccctgccacgaccagatctgcgtctgtgaaggcgtccattcatcaagagggcagcctccttttcagccaccgttccgatcccggcttgggctccggcttcgcccgccgcgggatccacgccgcccgactgggctcggcgaccgcgtgcgacgagctggcgggctgggtgaccgccggctgtcgcgtccgcgagaggcaccccaggtgctgcctgctgcccggtcatcaggccggtacgacgatctgccagcgtcccgccggttgtcggtccggtagccatcgcgcggccggaagtcgccgccagcagagccatagcctcctcggccgcggccgccccaacggtcgtcgcgcggatcccggcctgggccgaccgtcgggcgcgagccccagcgatcgtcgtcgtcatcgcggccgccgtggaacggcgcaggtcggcctcggtcgccccaggtcgccgatgaggctgtcgacggaccgctccctcgtgccgacaaaaacgaagcgtcgccggcaagcaggtcgggccgctcggatgcgctccgactactcgagtagcctcccgtcagatgtggcgcaagccctcggtccatgaagcctccgcgaccgccgctgaagcctccgcgagagccaggtgcggcgggcggggccacgccgccaaagccaccgcgcgagccaccgttctggaagccacctctaacgccaaagttgccgaaaggaggggcggacccacctccgccaaaaggggcccgtggcccgaggccgccggcgcggcggaggtcaacgtcaccggcgcccgagtacgaataggaccaagtctgctcgccgtcgagggcaatctgaagctcgagctttttgcggccgttcgaccaagcagcctcctcctgggcaatcagctgcgggatctcggccgccggcagaaagtcgacggacaaaggcggcgtcggctggggtgcctctggcgggaagtcagtccggccgagaagcgactggtacgccctgcacgcggcttccggcttcgtgaactgaggccgagagtgacgaaagggttcagcctcacgaacggcgcagatcagacggcgggagtcacgcacggcggcaaaagcgtggctcttgacgggcgagagccaccagccctccatctcggtcgtcgcgttgggcttgccggcgcccttgccgattccagcgttcgagtccagctctccgaaatcctcgagcaggtcaatgagggcaacgtcaggcagcggccggcggaggccagtgatgtagagtgccgtcgtcggcgggtgcgagccagcgataaagttggcaggtacgaagagcgtcagctcctcgtgctttgcgcgcttggcggccgacgcatcggacgttggaaccatctccgcgtcggtgtcgggagcagcaggcgagagcgagcgcttgcccgccggtgtcggaggaggttgtgtcgggatcggggcttgatcaggcgcaagcgcagtggcgacaggcactgaagaggcggcgccgttcatcgccgcgccctcgcccttgacggcgctgtcgtcctgagcagcaaccggtttcgggtcgctggaatcaatggcgacgtctgaggtggtgtcggccggcggaagcgtgccgagaattatctcctcctcgtcggtcccgagcacgtcgttgccaccgcgcttctcgtcttcgccgtcggcgctctgctcgacgccagacggcgcctcgtcgacgattgtctcggttcggtcctccagcgaacgcgacgacgacgccgtcaacgtcgaggccgggacgtcgggcgtcggtgcttcagcgctcgggccgccagcgctcttctcgtctgcgggcggcgctgcggccgacgctgctggtggagcgggggcggcctgaccgccattggcaagggcgtccggagccgtcgtcgcagacttttccttgctgacgaccggagcagcagcagatgcgtcggcctcctcgcccgtcgagggcagcgtcgtcgtagcggtctcgaagccagccgtcgcgacagtcgtcggagtcgcggccgcgccgtcgagcaggtcgatgagcgtctgcttcttgtccgactttccgtaagcgacgcccttcttgttgagctcgtccttgagctcggccaccttgagcttgctgtagtctgacatgggtctgaagagacggcagtgaaggaggtgccggtcagaggatgcccgctacttcgaccgacgcgaccatctctcgctgtctcgccgccctctcgacccgcatcgcaatcattgtgaatcgacaggtcgtcctttcagtactcatcgcctgcatttcgatggcgcacgcagctccctgagctgagtcgtcgtcaggcgcaagaaaagcatcatgtgcaccagagggaaagtcgcatagaaggggcctcgtgagaagggggcgtgcttcagacgagagcggcgacatcctggtcgacctgcatctcttccttgacggccgtgtcgtcctcgtcgtcctcgtcgccatcgctgtcgccctcgcctgagccgccttcaaactcgctgccgccgcctcctactttaacagacgaatgccggccgccgtgcgacttgcggggtggccgggcgggcaggtcggcacgtgtcggcttggcgacgagctcggcgccctcgggcctgagagggacggccaagtacgagttgtcagcgcgaagcggcgcctcagacaaagagtagaaggacgaacccgaactcgcgcacgaggaggtcctcgagcgcccgctccttgccctcgcgcacgcgtcggtactcgcgctcaacattttcaagctgccactcgagctcggcccggcgccggaggctctcgcgatggagcgccttcgcgagcagatacttctggacgatggccggcttctgacttgtcgatgctgctgccgaggaggttgcgagcggtaacggtggcggcaggacgtaggccgagagcgagtcatccgagtcagaaccggcaccctcgtcctccgagcgcgtgggcgaaggccccgcgaggaccggctcctcctcttcgtcggacgacgtcaggtcggacgtcgagtcgcccccagacttgcgcttcggcttgcccttcttggccgggggcttgaccggcttcttgcggccagacgggccggccccggagctgccagcagtcgcagacggctcatcgacaaattctggccgcttcggaagcgtgcccctgccgccgagcgcccggtcaagccgctcccattcgcgctcctcctcctgccaacgcttctcgcctgaaggtggagcctcccgcccgccctcaaagacggcaagcatcgcagcatgggccgagcgcgcggccgacgtcgtcgggttcgcccgctgtgcatttgacgcgctcagcgcctgaaacagctgcgagtgctggacgcgcatgtgcttcgagagcgcatcggaccgcgtgaacgacttgtcgcattctgtcgggcagaatcaatggtgtcagttgacgagcaagccttcgacaggcccaggtcggagtgacgggacgcacgcggctccgagcaggtgaacggcttctcgccggtgtggctgcgcaagtgcgagaggagggcgaagcgcgacgtctgaggcttggacttgcgcgggcaggtgtcccactcgcatgtgtactgcgagcgcgtcgtgccgatgtgatcttgaggcgggcaattgcaaaggtacggagcgagtgtcagcggtcgggacgcgagatgggcggcgagctccggtagctcccggcagggcgtgctccggtacgaatcgctgtctctcgaagttcaagcttgcacccgacagcaggtcccagcgatcgccacacgcaagtcacaaagccttggaaacagggaggccagacgttgcaggacgaacccttctggatgtgctcgatgaagacgccgagctcgtcaaactcgcgaccgcacccgtcccactggcaggtagcgacggcgaccgagcgcttgacgtccttccggtcttcgagctcgtccgctccgtcgccagagcccgagccggccgagccagaacgcttgcgtttgttcgtcgacgaggagggcggcgagggaggggcggacgcggccgaggagctcgaggacgacgggaccggcggcggtgagccgaccgcggatgaagaggactcgacgtagtggcgcatgtccggcgggaggagacgctctgcttgacagttacggagcaacaggcgagggtgatggtggagggtgggcgagaggaggaggtggacgcgcccgactgagctctactgctaggcagttgtaatccgtttcgtatccgagccagagtagctgccggagtcgccctcgacctccgctttagttcccctcctcgacacatacccgcgaccactactccaatgtcgtccgtcgctctctcctcgccggcctacgccgcaaagctcgacgccgagccgctgaatccggcaaccggtctctgctcgacccgagctctttacgagatccccaagcgaggcgcggtcggcgccgacggaccagctggtgcgtgcaacctcggtcgaggccgacctcgagtgtcagtctgttgatcgttgctgcttctttctcctttgcccctcgctctgtccggacagatggcgagattgtctacatggccgggaactcgctcgggctcctgcctcgccgggcgcgcgagatcgtcaaccaggagctcgacgtctggtctgcccggtacgatcccctccgatgcaatgtccaccagcacctgctcgaggaccatcgctgacctgccaaccgttcctacgacgcagcgccgtcgtcggtcactttgaccacccgcacggccggccgtggaaggacatcgaccagaaagtcaccgccggcctcgcctcgatcgtcggagcggaggaagccgaggtggcctgcacgagcacgctgacgagcaaccttcacaacctgtttgtttcgttctaccggcccgagaaggacaagggcgccaagcggcgcaagattctcgtcgagggcaaggcgttcccttcagaccaggtccgtctggctctagcgcagccggcaaacaggcgggcgactgactcctggccgggctttcttcacagtacgctgttcagtcgcacctcgacttacacgggctagggcccgagtgcctgattgaactcttccctcgtaagaacgaggtcaacctgcgaacggaggacattctgcgcacgatcgacgagcagggtgacgaggtgagtccctcggacgtccaccgcttcaagcgcatctcttaactgcgattctaccgtgcagatcgcgctcgtctggctctcgggcgtccaatactacacgggccagttctttgcgattccagaggtgacggccgcggccaaggcccggggctgcgtcgtcggatgggaccttgcccacgcggttggcaacgtaccgctacgcctgcacgactggggcatcggtacgtcttctgtctttgcaatttcgtgctctcagcagactgactcaattgtacccctcgctcgcagactttgccgtctggtgcagctacaagtacctgaatgccggagccggcgccgttgccggcctctttgtccacgcgtctcacacggccggcgggttcgacggcccgctcctcgccggctggtggggtcacaatccggcgacgcgtttcgcgatgccggccacgttcgagcccattgcgggtgcaggcgcctggcagcactctaacccgccgatgctgtcgatgctgccgctgatcgcgacgctggagtcgatcgagacggctggcgggctccttgcgctccggaagaggagcgtcaagctgacggcctacctcgaggcgctcctcaaggagagccgcttctaccggccgccggggacgaagcctgccgctgaggacgagctgtcgtttacgattctgacacccgaccgcgagggcgagcgcggcgcccagctgagtctcgccgtcgtcgagggcgccggtgagaagaagggcgtcatggtccgcgtctttgacgacctccagcggcgaggtgtcctcggcgacgagcgcaagccagacgtcatccggctgtcgtacgtccaatggtctgcttttgcgacgtccccattcggcatgccgctgacgctggagctcttgacataggccgataccgctctacacaaccttcgaggaggtccggctgtcggcacagttcttcgaggaggccctcgaggaggaggaggcgcgcctgaagtcttagtgtatcgctgttgatgatgatttcgagcagaccataggcagcgtcgaggcttaagcgagtaggcggcgcaaaggacgctggagctgaaggcgataagtagtgggcgagccatcgatcctcactcgacgaccatgtcctctgccgcgcttgtctcttcgcctgcagggacctcgccggcgacgatcctcgggaccgacatgaggcccttgaacgtcttccgggtctctgtcgaggggccaggcaagcgtcagtgccgtagacggcacgcggaaatgaaactgcggccgagggactcacgtgctcgcaggacgacgctttttgggctgcgcacgacgcaatcatgcgcctggtcggggctgaggcccatcagcgtgcccaggttgacgacgtcgcccggcgctcggacgccgccccactcgccaccagtcccgccggacgagaggatgatgcccttgccgcgggtgatgcgaatgaggtcccgggcgagcgagagcgtgttgcgccgggcctgggccgtctgagctggcgtcgctgaggcgaacgagggcagcaagggcgagtagggaatctcgaactacaaaaggcgcatcaggggtcagctgccataagttttttcggtgacaggcaggcgagaaagatactgacaaaggcgccgttgcggatggcctggagcaccggcttgcgcttgaggtagaacggcagtccacggaccgtgtctgggaagttgagcgtgatgaccgacacctgggtcggacccggcgtcgtcaggttcaggcaagcgtgcgtgaaggtgttgaccgtcgtcggctggaccgaaaggatgtcgtagcctgcgagcaacgtttgattctgcggcgactgtcgtgacggcaagggaaggaacccagggcatcagtcctgctgctgcgctcatgactgccggctcggccagctcgcgaaccagacgtacgaaacccggtccagagcccgtcatgctcgcgtcctcgaggacaacgtgcaggcggctcagctggacaacagcgtcggcccctcgggcggtcgtcccggccccttcggcgagcgggtcgagcgttgggaacgggctggccgagaaggtcgacgacgtcggcgagaggaatggattgtagtgccgcgaggggtcaattttggtgtgcgccgtctgcgtgaagccgaggacccggtagcccactagggttggtcataccggagggagtcagtgacggccgaatcggcagctgactggcagcaaagggtaggcaacggacggtgccgcgttaggaggacctgctcctcgacccgctgccgatccgagtcggcaatgccccaccagcaatcccggtcgctccgcttgtcggccggtcctgccgacgccgagccctgctccttgtccttgcccttcttgctcttcttggcctgcttgccggagccggaggccgagccgccagccgcctggctcgacgcagccgtcaggaaggcgtgtgacggcgatgggaagggcgtgtgcaggtcgaagaacatgctaccgggtgtggtgcgagagcaagcgtcccggtcgagctatgaaggaggccgagcgactagaaggcagaggtcgaggcggtcgagggttagagggaagcatgctcgggcttcgcctgcgcgagccgacgctgctctccctcctgaccgacgtcgtccatgggccgaccgactctgctcacctctcggacgggtctcgctccgctcctgctccgcacgatgagctcgtcaacatcgccgggcgttcgcaaacggccggcctcaccggtcgtcgagtcggccaagaagccggccaagggtgcgtcggccgcagccgggtcggtctctcggctgagagacgcctgaatcgctgacccttcccgccgagcagtggtgccggctatgttcctacctgccagcaagcgggcgaaggtaggccagggcgagagcttctgggtcacaggtgggccgtgagttcgacaacggctgcttgcatcgccgacctggctcgtcatgctgacggacgacggcgcaccgacgccttcacgcacctcgcccttgctccctccattgacataaccacaggtcatcgctactgcactattcgcacctccgccacttggcgcccccatacccgtcagcctcgactcctggcgctcagcaggccactgcagccatcccgccgacgcccgctcccaactccgcagcagccgtcgccgccgtcgcgactcccgccgctgctgctgctcgcgccaaggtcgccttcttcgacctcgacgggacgctcatctcgacgtcctcgggatcaaagttccctcgggacgaggccgactggaggttctggtcgactgccgtgcccggccagctgaaggctttgcacgagagcgggtgcgtgaaccccgcgcatgacggcccagccgcttgcgctgacgctgacaggcgcatgctgctcgttgtcttcagctggcggatcgccatcatcagcaaccagaacgggttaccggtcgccaagtcggggaagcagctcaagcgcgaccagtggaagaccaagattgaagcgatcgcgcgcaaggtgcggctctcctttgccgctcttcctctgtacgactgactgacgcttgtccccagttccccgagacgcctatcgaagtcctggccgcgcttgacaaggaccacttccgcaagccgctgctaggcatgtgggaccagtacgcgttggcggtgctcccggacggcgtcggcatcggtgcgactagcggtactgcctgaccatcgtcccttcaggcactgacatgctcgtgcacctccctccctacgactacagaccttgctgaaagctactacgtcggcgacgctgccggccggacaaaggaccacggtgacggcgaccgcaagtgggcggccaatgccggtctgcccttctttacgccagaggtgcggccctttcgcttgtcgctcgcttcgtcgcaagctgattcgatccaacccgatctggcagatgtacttctcgaaggtcaaggaagcgctgccgccgcttcagggcttccggccgatagacttggacagtcgtgcgcgcgacactctcgagcctgacacaagagcgcacgccctgatcatccttttcacattcttttccttccagagccattcttctcgccgtcgtcgacgccgctcctaccgtcatcggctacattcgaggaggtcctgatcctcgtcggcccgcccgggtcgggcaagtcgctcttctgccgcgaggccctcacgccaaagggctacaggcgcgtcaaccaggatgagctcggctcgcgaccaaagtgcatcgctcgggcgcgagaggtactcgagcgtgggcctccaggggaacaggatcgactgccgaggcgcgtcgtcgtcgacaacacgaaccgcaatcgggcaacacgcaaggtctgggtcgacctcgcacgcgaatttgggctgccagtccggtacattcagccttgaagccttactccaatcagtcgtctcctgacgcctctctttcacttctcacagcatctttgtcttcccgccgacgccggccctgctcgcgctcgccaagcacaacaacctctaccggctctacccttcagtcacaggcacctcggtccctccgatcgcgaccggctctttcgtccgcgactttgaggaggtcgacggcctggccgagctcgagggcgtcgtcggcgggggcgaggtcaagcgcctgtggatgggcgcctggcgcggcgaggatggaaccgagcgggcccgctgggagggctggatgaactgagttaattgggtctaggatcgcatgctttcaatgggtctcgtccgaggtgcagtactttcgtctcttgaagggaggagttacgggccggggcgtaagatgttcgtgccgcgcggcggccctccacgcacgacggcctctgccacgaccatcgcatcgacctgtctgacaaccaccaaccccttacagcactcccaccacctcttcagctccttcagatggacaagctcctcgcccagctccagccgtcgtcgacggccctgccgcaacgggacgagagcgcgctctacggcaacgtcgagggcgcgagcggcgtccgcttcggcgtccctcaggtggccgacgtgcgtctgcccttccttctacccagaccaccctctccgccgccagcttgcgagagctgctcgtgacatccagaggatcacgcaggctgagatgtgctttgtttgtgcttcgcacacggccgcttctcctcctccttcagccgacgagcttcctgcgcctgcacaccgacgaccactcggaccccaactgcaagatcaagatcaaccacggcacgacgacgcttgccttccgctacaagggcggcatcgttgttgccgtcgactcgcgagcaacggctggctcatacatcggtcagtccttcaccttgggcggttgtgccaacagccgcaagccgatagcagcacctttcaagctgccggctgctgctggtctggtccaaatagaagtacctattcactgacgctcacttgctatcgaacggtcgctttagcgtcgggcacggtcaagaaggtcatcgagatcaacaagtacttgctcggcacgatggctggaggagccggtgcgttctgccttgctggcctcaagctcgcctcgtgcccgtcgccatcctctgcaggcgattcggcgcgaggactcgtctatgcaacctctagcgtccgggacccgtctgacatcgagtgctctatcctggcccccctttagccgactgtcagtactgggagacatacctcggcatgcagtgccggctgcacgagctgcgcgagaaggagcgcatctcggtcgcggccgcgtcaaagtacctgtcgaacctcgtctactcgtacaagggcatgggcctcagcatgggcacgatgatctgcggctgggacaagacggtccgtcgactattgtcggttgggcctggcgcgcgctgaggggcgatcggctgactcgctgctgctgccatcctttgacacatagggcccggcactgtactacgtcgactcggacggctcgcgcttcaagggcgacgtcttctcggtcggctcgggatcgacattcgcgtacggtgtcctcgaccaggtgcggccccttcccgcttctcctctatcgcttaggacacccctctgccccctccctctgcccgtgtccttttcaccagatcagccgccttcccatcgtcaccatctcaggccgccgcttttccgtcccgtactgacgtcccctcttgaatttcaaaacagggctactcgtgggaccttgaggatgacgcggcgctggagctagggttgaagagtatcgttgctgctggtcaccgtgacgcctacagcggcaacacggtgaacctttttcacgttcaagtaagtgtctcttcgctctctctcgcaccagtgctcgcttgacttggacgcaccgctgaaacctgccctcccccgccctgaccatctctttccacgacgtcacgacggctttggtccgttcggaagcgcatcatcagcagcagcggtgcgctcgtcaccgacttcgcgagcagagctagagttgactccggggcaagcaaaagcaagccaccgtgggctgatcggcgacaaaataggggacgagactcacacgtcactctcgctcgggccgaagcgggccggttaccaaacaaatcggcagcagcgcagcaacgccgcagcagaggccgtcaccggaagcaaggcaaaaaggaggagatcatgtgaagagggcgagcggggccatgctgtgtgacttaagggagatcgtatgggcggggttcggaccgtgcggggagagagagggggcggtggagagtcatcgaagggccgagaagggagcgagggacaacagatgcgaggaaggaaggcggccggaggcaacagggaatggaagaaggaaggagagcgaaagtcgtagaaagggggtcgtgagcgagcgagcgagagggaggaacagagacgaaagggccgagcaagaaagcgctcatgcgtcgtcgccggcgtcctcgtcgccgtccatctcgtcgtcgtcgacgagctcccactcgtgctggcacgtctcgggatcgacgtcgagctcgagctcgtcctcttcctcctcgacagagtcacggagcgttcggtcaagctcctctccctcctcctcgccgccggacgaggagacagacgcatagtcgtcctcctcgtcctcatcctcgtcggtcggctcgtcgaggtggagccggtcgtactgcggcaaccggggccggccgagcacctgccggtcgagacgggcgagcaccttgtcgaggtcggtaaagtggtcgtcgttgagcgcgaaacgccggtggcggcgcgacttgatgtgctgcaagagtcgaagagagggtcggtcgtcagctaagcgagcgccttgagaaagccagcgacgcaggacgggcgacgtactgcggcaaagtcgtcaaacttgtttcggcagttctcgcaatagccgggcttctttgtctcctcgcgagccgggagccggaccttttcctttgcgccacttgcgccagtgccgccgaggttggccgggagcgagtgccgcttcttcatcggcggcgggtccatcttgcccgtccctttaagctcacgccgggcgtggtcagcccggaccttcgcctcgagcaccgctgccgctgccgctgccctcgcctcgtcctcggcgagtgcgacagccgcgagcgccgccttcgtcttccgcttgcggaccgacgagggctcgccgaccgccgtcgagacgggacgggagccctcagccggacccgacgcgcccgccgccgccgccgccggcggccgagggaggaaagcgacctgcttccggttgagctcggcaatcgccttctcgcggccctggcgatcgaacgtattacccgcggccgcgcccgactgggccgacgtcgtcgtcgaggtaatgttaacgctgttgcccgaagccgcaatgtacgccccgtcgttgtcggccgcggccgggtggcgcgtgtcgtcgagcgtcgcgagcttgctcgcccggccgaggttgttgagcgaggccgaccgccggaggttcgggtcggccccggcgccggtgcctttgagcagcctcgccgggagtcgcgcgatcggtcgctcgccgccggcagcggtcggaacgaccggcgccgagggagccggcaccggcggaggcggcggcggcgcaaacttggagaccgacggcttgagaaacgtctcgtggaggacgggccattctggaagatcgccgttccgcggccgctcatactcgcgcgcgatcactgtccgatactcgcccgtcgcgtcctcgcagaggacatagtaggcgccgcgcgcaaagtactggtagtcgggccgcggcgcgctctggtcgcgctcgcgcgtgccgttcttgcgttcgtcctcgagcaggtgtgagagggtcgcggcggccgcttcggcgtcggccgccttgtgccggctctggatccgggccttcttaggcgagacgtcggtcgggagaaggcggttgatgactgactggaactctggggagaagagcgtgccaaaattgatcagctgcggccatgttagagacgagcgctgcgcacccactcttgacgtcccagaccttcatcttgaacgtgagcgccttgagcaagacgtccgactggcccgtctcgtcgaggaacggattgacggctgactttgccgaccggctgctcgccgccgtcgccgtcgtcgatgctgaccggacatcggtcccgccgatcgtgacgcgtcgcgcgacggctgccgctgctgagggcgcgggcggcgcattctccttgtctttgaaggtcgggaccgcgcgtgaggtgatgacgtgcgtcactgagcgcgagaagaacttgtcgatgcgctgacaaagggtagaggagggggacttcagtaacgagttaacggtcgacgacgcgttacgagggagagaagggaccgaccgcgccaaggtcgcgtgcctttgcgccaaacgggccgggctcaaccgagtcgaagtgaaagacaaagttggggaaggcccgcgtgtacttgttgacgaaatcctgctcatcctgcttgaggctcgccatcttggcctccttgtcgcgccggccagccgccttgatcgccgccgctgccgtctgctgctggctcgcgctcgccgagccgccagcggcgggcgcacccggtgggaccgagccgctgccgtcggcgccgttcgtccctagcggctggcggggcgtcgaggccggctcgaccttgaccgcgacggccgagctcggccccgtcttctgcttcttggttacggtcccgcccgccagcagcgcaccgccgcctagcgcggtcgagccgctcgtgacggtcgtcgtcgaccgctcgtttcgtctcgtccggggagagagcgagaccgctcgcggcttagcaacggccgacatcgagggtgtatggagttggaggctcggcttgcgagaggtcggctgaaggtcgggtcgtcagggagtggtccgcgcgcgcgtctcgagacgaggtgctggagcaagcggcccgacttcgttcgtttcttctttcgcgagtacgggtggaagaggacggtccagcgtcaatagggaaagctgtcaagagaggactggcttggcgagtattgaggtgtatgagtggaggtagggaaggtcgggcaggtcgaagggacgtgtcaggcggccgacgacgcgacgggcctcccgcgcgcgctcgccagcaggccgggaaataaaaaaggcccctcgcgcggccttgaaattgggcaggcaggggcggaactttcagcccagccgaccgtccgacgacgaccttcctcactgaccgctctgcgcctccgcattaagcgaccctttgagctggtgggtcgaccttctctcgtcctccatctccctcccctgcccgagccaaaagacgaaacatagacatttgcacgtcaggtcgaaccggccggagagggcgcaagccttcttcgactgggtgctgcgatcaaattcaagccctgggagattcgtctcctcgtggtcctgatcctatccctgctttccttcctcttgtgctgcatactgctttggtacgatcagttggctgaccaaccgctcgtctctgccctgatttcagacccaaccgaatggccctctctaccttctgtactcttgccctgctctcacatgttctctgccctcactcgtcccggcaggcgtgtgcctttctgctgtcagacccatgcaagcccgacgtcgtttgccgccccgctgagacccaagatgatgaagcgtctcgtcgacgacgtcgtccttggtcaggcagcgtcctctacaatcaacatcaggtcttctcgtgatggtgcagatgagtcgcacgccgacgcgcagctcctcttgcgctgagctcgactgtcgaggcgtaattacaacaggggcgtcatcgaatgcgaatggctcgccttctgccctcgtgcgcgggcatctcctgaggcaaggacgcccgcgccgctctatcgccggaaccagctgagccaaaagtcgttgccgaggccgacggcggtgtagcggtggaaagctgcgattcgaaaagatgagtgacgaaggtgatggcagagggcgagagggagggaggaaggaagagagggaggttcgtcagtcgtcggacagcattagctcgatcctcctcacgcaactcgacccagggtgctcgatgcaaagggtcaggagacgcaaggaagcgcacgcacccttgaaagcgacccttcgcccaaagtaggccgcaaagaacgggacggcgagcccgacgagcagcttcgtctggccgacgagccggtcccactcttggcgcgcgagctcggcctcgtactcgtcctcgtcaaacgaggacgaggaggagccagacgagatggagccggtagaggaggcgacgggcgaggcggaggcggagccggtcagggctgccggattggaggccggcgtgagcgaggaggaggacatggaggtcggcgggccgatgacgacgacggaggcgaggcaagcgagcggcgggcctgggacgacggaggcgagcgaaacggacggaggcgagcgaaaggagcggaggtggtctaggacggaggcaagggtgggcggttgagcgtggaagatcgccgattgtctggaagcggagaagcgggagacgtgagggcggaggagaattggaggttgtagtcgaactgaggacgagctcgctcgagcacgtcaggttgaagacgaccggggcgcagcggtcgtcgcttcgtcttcagctcacactcgatgctgggaggcacgtcgaatcagagacgagcagcagcagcagccattgccgagagaaaggatagtcgtacaacatcaagatcggctcccgagttgggcacctccggccctagcccgcccgcctctaacgcaggcaacctcccccttcacatccgggccttggcctgcgcactctcgtcgccgagcgcgatccggacaacgtcgacctcgcctccgatgccatcctgccagctcgagtcgtccctcgagtcatagacgacgatcggctggccgctgtgcgggtcatccgacgagttgtcgacgagtctcagccggtcgatcgacgctgcctggagcgcggccgaggcggaagggctcgagagctgggcgacgctcgccggcgactgaagccggctcttccggatctgggcgcgcgagacgcgccgacccgtcttgagccgccgccgctcggcccgggcccacatcgtgtcctcgtccgtgcaaaagacaaagaggacctcgacaaggtagccggccgagcgaaagtcgtgcatcacctgccggaaccagtcggagcacgagagcgagccgtcgatgacgaccgaccggcgggcggagcgggcggcgtcggtcaggagctcctggacgagcgacgactcggcatggagtagcgtcgccgtctcatttgggtaggccgcgaggtagagcggccgctctggcaaaattcgcgaaatcttgtccgggtcgatcctaggaaaggagatgagaaggatcagcttcgaacgagcaggcagcccaggcggcgagagaaagtcgcaccagacgaaattgtcctcgagccggatccggccgtcctcaaggaaggtcctgagaacgtgacccttccccgcgcccatgccgccgctcgtgaagagcgcgaccggctgccgattgggcctcttcgacgacgacgagctcgcgctgcaggccgccccagcagcagctgctgctttcggccggtcgttcgagtcattgactgcactaggcgagtcgtcttcggctgcgtggcagaagcggcactcctccttgtgcgactcggcaaggacctgattgacaatctggtcctgaagcctgtgcgagtaaaaggtagtgatcagtctcggcgaggcttgttcgagcgcgctctgggacggaccgtcgccgctcggctgtcggcttgcggtggtagctatagtcgagcttcgacctcgcctcggcaaacggcccgccatgcgtctctggcctcgcgagctcctcggtcgagaacggctccggatccgcgtagaggtcgacggtcgcttgccggagctgggcgtcggtcaggtcgggcggcgggtcttcgacgcgcgaaggcgagatgagccgagctgagctgagcgtaggcggccgcgacgacgacgacgagggtgaaggcggaggcgagatcatctgctgctgcgtctcgctctcggtctgcttgctcgcgatgagagggctttctgagaaatgttggagctgaaaggccggccttgagctacagagcaggcgggccgaagcggcggcaagggcgagctgcggcggcggtgtcggcgtgcggataaaatgagggcgagccgcggagagcctcctgagcatgcggtcggtccggagaggagtcccttcgcacgtgctgaaggggagaggggagtggccctggcgagcaaagcgatggcagagtgatggggtcgaggaggaggccgagaagaagaaggtcgagcggtcgaacgagcgaggcttcggccgacggcgcgagcaacgacggcacgcagggcgaggaggccggcccgactgctctgataacatcgacacagcgaggcgacccaaccggaggatagctctagtgaggctgcaggcagctcttcgcttggacggcagcgaccagcttaagacctcgacatgatgagctacagaagcgagccctggccggtgcgccaggcgtttgctgcgcccaccaccctcccgtggccgtccgcctctcttgctgccgcaggaagcaggctcttcagctcacctgctttcatcatgtcctgttgaaagctgagacgttatgctgccggataatgctctcgtgtcaacccgaccacagtcgcaaagggctaggccatgatttagagtgcactttccgaagccggctgtgtgccgatgacgcgcgcctctgccaagttcgccgcttcagcccatcgacgaccaaagccggcgccgactttgcggtccttccttccctcctctcttccacccaccaatcagcccactacacgatgccggcctcactctcgctcctcttgctgctcgcagcaggcaccgcccacgccctgccctttggcagtggccagcaggtcgtcctcagcccgtcgctgtcgtcggcggccgaccacccgctcgcgattcacaacgagctcgacccgctgcgccgtgcgttcccctctcatgcttcttcgcctgatcgtgcgtcctatcagcagaggctgatgtgacgctgtttctctcgcagacctctcggccatctcgccttatttctcgcccgtcgacgagccggcgcctgtgccggagggctgcaccgttgagcgcgcgagcgtccttatccggcactctgccatctatgccaacggtcagtgccctgtcttggctcgcttgtgggtcgccaggaggctgcagctgactttgtatacggtgtcctgtttgcgatcagacgacgagtggtacgacgtacgtcctcggccttctctctcgccggccgcctctccacccattgtcctctcactgactcccttgctccttcaacgtgccttttgcagaccatggagcctttcctctcgaagctcaagacgcttcccaagtcggccttccctgacccggccgacaagagccacccgtgggccttcctgcgttcgcacaagtcgccggtcaaggagaagctgctcgagaagctcagcccgaagggctcccacgacgcccttgttcgtctttgtcatcccgccaaattgtcgctcagtgcatctcgctgacaccttggatattccttctttggttctcggcagcactttggccgccagcagcgcaagcaataccacgcgctcttcccgagcaaggactggggcaaggaccacgagcgtggcgacggcgggcgcgagaagggccccaagacgccctacaaggtctggacggcctcgtccgagcgcgacatcacgtctgcccggtcgttcatcaagggcgcgtttccctcgcaccagacgggcgacgacggcgagggcaacggcgaccacgtcgtcctcgtcgaggtccccaacaaggacgacaaggagtgggaccggagcctgacgccccacaaggtctgcaaggcctttgagaaggagacgtcaaaggttcctgcggcagagtggctgggcgtctttggcaagcgtgtccgcgaccggctcgccgatggcgtcctgcctgggactgcctggatgcagaacgacgacgtcctcgccatgatgatggtgcgtgctcatgcccgacctttgacttgccctgtgaatagagggactgaccggccgcgtcttgacgatttccttggcttgctcccagctctgcggctacgagacgatcacggcgggcgactcaccgttctgcaagctgttcgaggacgaggagtggctcgacgtcgagtactactttgacatccgctgtgtgtcatcgaatctttcccgtctttggtcgctctccacctctcactcggctgacatccctcgccgtcccgtcctcgcccaccagaccactacatgatgggctacggccagaagctctcgccctacctcggcatcccctgggtgtcaacggccgcgcacctgctcgccggggccgaggccgacgacaagtcggaccacccgctcgtggcgatcaacaaggaaaagccgcttccggcgcccaagcttccgcccaacgcgacacacacccagcggagcagcttctttttgacccatagggagagccctgcgttcgtttcggttgcgctcaacttgtacaacgtgacgacgccgtcaggcgacgcgccgtcctcttcgccgccgccgaccgactatcggccgatcggccgctcgtggaagacgtccgagcttgtccccttcctcggcaacattgcgctcgagcgcctctcgtgcggcaagcgctcggcccgcgagggcgactttgtccgcgcgctcgtcaacggaaaaggcgagagcatgggcggctgccaaggcgggcccggcgacagctgcccgttcaacatctttgaggactgggtcgaggcccgcaaggtccgctggggcggctgggaggaggcctgtgccaagaagtgaggctcttcgaatccgatctaccactcgcagcttcctatgttactctcgccccaagggggtccaaatctcgttcgtttagaccacaaacacacgcaacattgtacactggccaaatctcgctcgtctgtcggagcgctacgtgagggggatgcaggaggccgaggggtggaggggcataagcgggtagggtctacagaggtgtaaaggggagagtcaaagatgcggaaggcattcgttcggaaggcagaggggaggcaggatagttcgtctagctacagtgagccagggttcagaagccgccaaaggagatttcgcggaggaactcgacctcgtccgcgtcggcagagtcggtcgaatttgcgccagtcgcagtcgctggaatcggctccgtgcctccgccgccaggcggccagatgccgatcggcttctcccagccttgaagaccgagcaccggccgctgcgggagcggatacagcgcgttgtagaacgagtggggagggaggaaccagcgtggcatcgcaaggtacggcgggaggacggccgacgaaaaaggttgggcggcgcttggatcggtcgacgactcggctttgacgagcggcagggtgtgggtcttgaaggtcgagaggacccggccgtcagacgagccgagaatggtcgcgccggcaggcgacgaccgagtggcggcggtcgatgacgtcgagacggcggtcgtcggtggtccacgggccttcttcgacagacgctggatgacctcgccaaggtcctccttatcatcgtcgaccgttgccgaccgcttgcgcttcttgtcgccaatcgccaatggcttttcgggcgacgtgctgcgctcgaccgtcgccgacattgaggcccggccgcggagcatctgcgcgagactgacagtcgtgcggacggtcggcccgagcggagccggcgtcgcagacgctgaaaatgagggctgggcgagtggggtggagagccgcgagaagagcgtcgggatgcggatcgggatggccggttcgtcagcctcggtcttggccgccgggaaaacggtcgacagtgcgagacgttcggccggacgcgaccgttcggcgagaggggatgtcgcaggctctttttccgttggccgggagtcgacccgccggcgaccagtagaagtcggtgccatgtatgggtagacggcgcgagggcggacgactttgactgccggcccgtccttgaccgaggtagccgcatcgacagtcgaactggcgtcgccggtcggagcaaacactgaccccgcgacaggttcggcgactgccttctgcttgcgcggcttgtcgagaggcttgacgggtgctctcaaccgagcggaggacgacggctcggccggagggtcggacaacgtcggtccgccggccctgaggccgcgcttggccttggctgctccgacccggtcgacggtcggcgtcgccttgacgatcgtgttgtcggccttctcttcctcgatctcttcatcagagaggaagagcgagggcggcggcgacggtgtcgacgtgcgcttctgccgagttggtcggacgaagctgagcggccggcggcctggctgaggccgagggcaaggcgagaaggccttgccgggcttggccttctgccgacgggaaggcgaggatgagagctttgggctggccttgctggggcgcgacgtcgagagttctgaagttgaggcggatgcgttgatcagtgccgggcctatcgggagaggaggagccgaggaggacggcgagactgacggtctgcctggccgtcaggttcgacactgacgctgacgctcgaccgagccgccgcccgtccctcgcgacgctcccttgggcgactcgtcttcttacgcttgttgccgccggagacggccttgaaggcggagagcgcgagggcgaacgacggcggcgcggcggccgacaggggcttgttcggccgcttgggccgggagggcgagacggcggcgcgggcggcggcggcgggcgtcttgggaggcggaaggtgcattgtactgaggaggtcggaggctgggagatcagggcaaggaggtgactgtggcttgaagaatgggagacgggagagaggcgagatggtcgtcgatggcaaaaggggctcgcgtcggagggacgaggcggtcagccgcagcgagtcgttgttgcgcggacgaagacgcgagcagttccgtccagctgctggatgagaaatggtgccgttgggcgccggtcgggatgagacgtgcccatcgatagcgatggagacttggtagaaaagcaaaaagaggaggggtcggcgggaaagcagaggtacaacgaggaggcgaagccggcctgccgaaagggaggagaggccgaggtcgagagcgtcctttttgggtcagaggagaagggcgggggcgaggtctagggcatgatggggtgagatgaaggggttgcgcgcggggttcagagagccggcactcgtacaagttggctgagacaaaagggggtcccccgcttgaggcgctgagcctcgtcaagaggaagagccgggagcgagactggcggcgggggcggcgtcgggcttgaggccgcgaaggaagaaaaaagatggcgagagttgcgaagaagcagaattgaggggaccgcggagtgtagtgtgggcggccgagaaagcgagaagagttttgcgtgctggcgagaggcgcgaaggggaatgctttgagagcggagaggcgttttgttctggatccgagatgtgctccgatcaggctctggccgactcatcgtcggcgttggcggccgccgcgtccgacgactcgcgggcctcgcgcagacgccggacgtagttgacgacccagcggacctgctcgtacgtctcgattgccttgacgctccgccggcgccggatgacggcaatgacgtcgcgcgcaatctgaaggtcggcccgggcgtacgcgccagcctcgctgccgaacagaaaacgctcgtcgagctcgtcctcgtcggcctccgggtgcgacgaaggcgtcgtgaacagggccgaggcggccatggcgaaggacgggacctcgcccgtctcgggcacgaggcccatcttgagcgcccaggcgcaggcgacaagtccggcgcgcccgacgccgccccggcagtgggcgaggacgctgacgccctggagcgtaaagtcgcggacgatgtgctcgatcgcctggtcgaagttggcaagcgagacgggcgtcaggccctcgggcatcgggatccgaacgagggcgagcccaagctttgcgcaaagcgaggcgtagagtgcgatcggcgagccaaggtagaggagctcggagtcatcgaggcagctgtcgtcgcgcgtcaaggtcagctgacgatcgatagagctcaggctgcagccagaggagagagccgcaccagatcatggcgccgacgccgaggcttttgatccgccgaaggtcggcctcaaggtcgcggcagatggcaccccggcccttcactggcccgccgagccggacctttttgcccgggcacgagctcatgagaaagttgccgacctgccggccgtcggctcgctcgcggtcgggatcaaagacgtcagtcgccggcgccgactgggcgagccgcggaagcgagagcagacagggcagatcgagcgtcgctggcggggtcgggacggggtgggaaaggaggggagtgagcttgccgagggacgacggcgggatgaggatcgagatgctgtggaggtgcggcaggtgatggacagctcgtcagcgcggcattataaggtgtaccgccagagcgaggcgagagaccgcacttgatcgggtgcgtgtcggacgtcttcatcgcgccaggcgagaggccgccgctttgcgcgctcgggaggatgagctgggccgagtcggcgacgtggagtcctgcgctcgggccgggcgagcgctgccggccagcctcaatcgaggagaagacctcgcctgccgctgcagacgacgacgacgacgacctcgagggtgaatattgcggcgacgtcgacagcggcacgatcggctcggcgatggcttcccggatgcgctgctcgacgccgctgccgtccgcctgatcgtcagcgtgcgcaggacggcgcactcgctcgttaatccgcgccgactcgccctccgcaggctccgtctctaccggcctcaaagatgcctggacagggtccgtctttccgacggcaatcccgtgcaaaccctcctcctcggcgagcgcccggcccgatgccggctcaagcgcggcgaccgcaatgtggtgctcgacggctcgcgtctggttcgtcttgactggctcgtctgctgcaaaggttggtgacgacgagacggacgagccgccgttgggtgtcgagtcggacgacggcgacgggcagagcgtgcccttgagcgttgggtctgctgcgcagggcgagcaggttgggacggcggccgatgaagccgacgacgcggcgccttcggcaacctcggcctcgaacgcagcctgctggtccatcgtcttccggacgtgctctggcagctggatcgtcagcgggacgtaatagatgggtgcgcctgtgcgaagagggtgaaagcgcgtcatctatgtggtcagccctccctcctgcgcccttgcgcgcatcatcgacccgttgggcggccagaaaagaagcgacgcaccggccggtccccacttgagccggttgtactcgcttcggtggtgctgcgagcaaagctccgagaggccctcaaagtccttgacaagctgccgccggcgcatctcctcgtccttggggagcaggccggccggcacggtggctggtgctggcggcggcggcggcggcgacggcgtctcgcgctgttgctgctgctgctgcttctcacccatcgtcggcgccttcttggacggcgctgctgggaccggcggcagaggaagtgtctgcccacctcctccggctgtcttgctcaacggcggctggggctgagcccggtctgccgtcggcgggtggtaggcccgttgcaggcggtgcgacgccggcggcttgggcggcggcctcgagctcggcgccggctgccggtgggcgggcgtgtaaaacgccgctggtggcgaggccggcgagagtaccgtcgacgacatgcaaaaagcaagtatgaaggcggaaggaagagaaggtgaaggttgagtgctcaaggcaggctcaaggctcttgctcgggggcgggaaggggcgcgacgctccactaaagccccgcgcgcagcagacccagtgggaacccgaccgacggcccggccagagttgcgaaagggctcgtgaataggagggaaagctggtggcaaggtctgtgggggtgcaagggtagctatgcgagatggggtaccgttggggcagataggagcatgatgaggggcgagaaggagggagacgccggctgtgggcgctgtgggcccagagttcgtccttagctcgaaaaggtcgggaggaggacggcagggagcgttcagagagaggatgatacaggaaaagggagggagatggccgtatgacgggaagacaggtcgtccgagatggcggaggatgagaaagagagcgtgtcgatgaaggagcgtaaacgagggggtcggaaggggtcgacttttgtgggtcggatcgagttgcgagagcggagacgtggatcgttggtcttggatgagagtgtccgacgagagcgcgggcagaaggggtatcggggtgcgatgtgcgagcgagggtcgacaaagcgacggtgcgacaggtagccgacctcagtgtcccgtcaaggcccggtcggccgcgtcttgcgaaccctcgtatcggacgacgctgtcgcgccgcccgttcgctccatagatgccgctgacccgagacgatcggcccgtcactggcgctttcatggcgttgcccatcgccatccgggcgaggtggttgcctgtcgtgccagaggacgggacagcgggtcctgcctgggaggtgagaccggccgtcgaccgtgatctgggcatgcctggccgggagctagcggccgccaccactgatgccggaaggccgaggacgtcttggttcttgcgaaggaagggcgacgggaggtcctcgttctccttctcgagccagcgcggctcgggcggctcgcgcgagcagccgcgcgagcccgcgaagagcccgcgctcggccgccgcgagcgacgacgacgagacagacggcggcatgtggaagccgctgttgctgctgctcgtcgtcgacagcgccggccgcgactgcggccgttcgatcgcggctccgaaggggttcgtcggcgactgccgtctcgggactggggccgagcccaagcccgacgacgctcgtggctggccgaccatcgtcgattggtggaggccgctcttgcgggccgacatctggaccgaggccatcgtcatgtcggccatgaagtcgctgccgggactgtcgtcccgcgcgcgctgctcccgcgcagctgcggcgaggttgcccatcgacttggacgccaggcgcgaaggtgtcccggcgcgccggagtgacgacgttgcgaggctggcggccgagaaggttgatttcgtcggcgtgttggggtcaaaaaagctcgattcgcggcgtgcgccgttggtgttcgggaaggtgctggaagtggaacaggagtctcttgtcagcgcttaacacggcgaagaatgagcggatggggggtcgagggccttactttttctcctcgagcggcttcggaaggcccgaccggcgagggaccttgcttccaaacggctttatgccgctgccagggatgtccaagacgccgtccatctcggtcgggctcatctcgccgccgttcgaatgggcgcccatgctcggccgtctgcttgcctgctgcggcagctgcgactgctgctgctgctgctgctgggtgagggcagccgacgatgatgctactgtgagggccgcccgcttctcctcctcccagcgctcgcgctcgacccgaagcgcctcgcgctctgccgaggcctcccgcctggcggccaccacctgccgctcgagatggcgctcttgcttcgagcaggcctcctcgcgctcccggacggccgcttcgcggttgaggaccgcctgctcgcgctcggcgagctgcgccgaccgctgcttgatcagagcccggctggcggaagcgcgaaacaacgaaggtcagcccgggattcgagaccataaggacagagtcggcgacgcacaacttgttttgctcgcgcctgacgacgagctcctcgcgtctggcatggatctcggccatcttcggatggctcaggatctcgctcgcgctcggccgaagcttcgggtcaaactcgagcatgcgcatgatgacgttgcggaggtccgagtggacgcgccggctcagaggcgggatccggcgcgagcggagctggttggcgaggtcgttgtgcgtctttgcctggtggaagggcgggctttaaggcggatggttgtggcgggcgcgtcagtctaccgtgagcgctaagtcggagatgaggcggtggagaaacgcactggagggcgaccatctcgtagatgacgcagccgagagcccagatgtcgctcttgctgtcgtagctcgactcggaaaatagctcgggcgacatgtagtacggcgtgccgacgtacgtgtttgcaaacgtcgccgcgccgagcgccttcgataggccaaagtcgccgagcttgacgttctcgcgcgagtcgtcgaggaagactgcaggagaacgctcgagtcagccatcgtcggctgacgggtttagtcgacgaaagagcgggcggacgcaccgttgtccggcttgaggtcgcgatggaggacgcgctcgcggagctttgggctctccctccgcctcccgaccggcgtcgccccgcggctcggcggccgcgacgtctcgcactcgtcttcgtcgccagttccgccgccgcctccgctgtggcagtgcttcagggcgagcgcaatctggtaaaagtactcccagatggtctcctcggggatcgaccggttgttctggtcgcactcgcggattaggtgcgagaggtcgccgccgccgcagtattccatgatgatgtgaatgatgccgcgctcctggtcaaggatctggcagcggtcgaggcggtcctgggtcagccgcttgattacggcccgaggcggacagaaagggacagagaacgaacccgctcaataaagccgacgatgtttgggtgttgcagcgtcgagaggatgttgctgtcgtgagcgagaaccaagcgtcagcctcagccgtgttgacgccgccgcacgatatcgcctaggctgggtggagaacgcgaccgaggaggaagaagcacgtacacctcggccacgagctgctgcttgtcccgctgcgtcatctttgagaagtttagctgcttgcgggcgagttgctgcgaagtcgaagtcggttcgaggagcagagacaggtcgtcgtccgggcgataacgatggcggcgaagaaaacacgaagaagatcatgccaagcgtacgaaggcacgaggtcggacgggaggaggaggcaaagaggcgagatggttcggcggatgaggagacaagcaaaaggcgtcagcgcctccatcttggccagagtcgtttaagcccccgaagagcgccggggcagcgggcaagacagctccgacgcggttctgccagcggagccaggagaaaaagaaagggaagggacgacgcaccctcccgtcgctcttccgcgtgaccttgtggatgacgccgaacgagccctggccgatgagctcgccctcggtgtaggcgtcgaggtgggcgaggccgtggtaggctgggccgttgctgccgctcgcggcggttgacgaggcggccgtgccggcggccgacggcgggcgggacgatgacgcctgggcgtgcgaggcggccatggaagggcggcgcttgtcacgctgacgttgaggaggaagtgaaaagaggattgaagggagggcgagctcggaaggtcggctcgagctggcggttgcggcggcgcggcgcggcgggttgagtgacgctgccagacggcgcggcttgccggaagagggaacgggtcggacggccgagtcgcaggatgggttgaaggagagctcaagcgatgggcgctagcaggctagtgtcggggtcgccggtcgtcctttgccgagagacgagggagctgggagacaggcgaggtagcaggcgggcaggagagaagagaggtcgtaagcgttccgcgttccgagcggcggtcgatgggcgcaacagctctcgctccgagcttccagccagctggaaccagagggcgcgtccagcgtgcgaaatggactcacgcgagagagaggccgagccagagactgttcttgtgatggacttgcgtatcttgctgttgcttgaggaaggcaggagctgcttgaggttcgttcggggacggcagggccggcagatgggcgggcgctccctcccccctcctgcttattggccgttcctcgcgttgccctcatcgacagccacccaggtgagtagggcaggcccagcgagagcctcgtaccctgtacgctctccatttgctgactcttggcccggtccccgcgcctccctggccgtcgtccccatctcgcgcacggccgcccgccctccaacctctcctccggccgccctacaccctccatccgctcctttcctgtcgacactttcctgtcgacagctaggccgacagcaatccctgccaccggtagcataccggcagacttagctcggtcagtcgagatggccgttccctcctgcggaacttccccccgccggcgcagccaacctctctcccttaccacctcccctcgcgctcccgcctcaatcctttcgacagccatccaagtctggcttgcagtcgcaccttctcccgccctgccacttgtccgcgctgttctgctgaccccgtacgcatggaccgagagtcacagccggccgaagcgaaagcaaggctggcagggtgcaacgacatgtagagagcaggataattggcagtggagggcaggatacaacgagatgcgatgcttgaggcggaggaggaagtgctgggtaagaagggagggatgtagagcgccgacggaagtgcgcatgggcccagcctcacacgccgtacgggctgcgatttgaaaagacgggtcagcgactcgatgcgaacagggttggaaagagagacagaggcaactgactcgggccagtcttcgacgacgatcgtcggcatgagcggccgacccggcccattcgacaacgacgacccgccgccgccgccgccgatactccgtcgccgaccgcccttgtcgactgccggctcagcgccatccctgttgcgcttgacgcccgcgaccgccggcccgtcccgtctcggcttgggcgcgacgagccagcgtgcgagccccctccggcgaggagcccgattcgggtcggagggcggcgtcggcggctcctgctggtaggtcgggaaggagcgcggggcagaggacgtcgggttgaggagcgacgagagtggaagtcggcgggctccactgctggcgttggtgagttcggccgacgcggccggcgaattttgctgttcaggacgggaaagcaccgtcagcaagcgcttgaagtcgtccagggcaaaagcacgcacccttgccagctcgggcgtcccgaggaaccctgcggccgcttcgatgtaggccagcacggcatgctcaacctcctccagcgggtgagcgtcgagaagcgcaagcaagtgcgcctcgagcgagggcgtatcgtccgagatgtccgtcagctgtcagagtgaaaaggaatggggcgtccggtcagcgcccttttgcagatacggtcggtggcgcgagtgtcaagacggtcgtacctcctgcaaggtgagcctgcttgcgcgccgaaactcgcgccggcgcttgctcccaccagcctcctcagccccgccactgccgaacaggatgagccctgcctgctcgagcccgcctccgaccgcctctgcggcagaagcgctcgtaccgctgctgtagctgctccggccgctgccgatccggcccgacgggccacgttcgtcgctgccgctcgtggtcgctcgagtggtagtgcagccaattgaaaggaccgcttcggcgctgtcgaatccgcgccacgcagactcgacgaagccggagaggaccacctgccggacgagcgccgcgaggagggcgaaccaggcgcgcgttggccgagcggccgcggaccttgctccctctgaagccgcggcagatgatgttgacttggagcggcggtgagggggtgaggatgtgctgcctgcgctggtcgagcggctccgggaaggagggttcgaaattcggcgggctcggtgagaggagactgaccgcgcggccgaggggccgtccatcggagtatcgctgttggtgtcgtcgtcgtcgtcgtcgctctcatcgtccgagccgccagcttcacccgcagcgcgccgctccgcgtctgcctcgtcgaccgactcctccgagtcgctctcccaaatgaccaccggcgtcgcaaacgtcaacgccggtcctgcccgaccgagcctcgctgcccagcctccaccggccgcgccggccccagccgacggtccaaaggccggcgtgaagccgtgtcctccgcgcgcgacgagtggccgcaggacgccgcctcgggctgacgaccgcgcgcggcgccggcgctcttcctcgtcaatcgtcgagcggccgacggcgctcgcgaggtcggcgctgacgaggaggaagcgttcgaggagctcgacccagcggccgggaccggcgctagggtcgtctgacgacgcaaagccgtcaggggatgtggactttggaccgctgagcgagggcgagtacgagggcgaccaggtgccgcctgccgtcgtcgttgaaggtcgcgcaaggtcgtaccatcggtcagggaccgggccaagacccgacgtcgagaagctcgagaaggccgaccctcgcctggagcctaatgaggaggctgcgaccggcgcaggcgttggcgcgcgggaggtgtggaggctgctgcttgctgatgatggggtagtctgggttgagtcagtgacgccggcgtcgaaccacgctttggcgcgagcggccgctggagaggccgctgcgcggcggcgtgatggaggagtgacggccgatgcagggaggagtggttctaggagggcaagcgcctgcctctgcgctgccgaaggcgtcgctggtgcggccggagcgtccgaccgcacaagattacgctcgtgcggctcgccctctggccaggcgagaacgtcgacgagccctgcgaggccgagccggagccggacaccctcgggcaaaacatcctccgcttcctcctttggggcgctgacaatgtagtcgtcgtcgtcgtcctcctcctcgtcgtcgctgctgacgtttgactcggagagaccaggcgtcgacaggccgccagacgacgagagccggacgcgctcgagcaggaccgagagcatccgctcgtagcctgccgccttcgcctcgagcgcggccgagtcgtcctcctcctcggcgatgggcgatggcaggcgatgggttgacagagaggccgtccgggcgagcgacggcggcggtcgagggccagcggcgaggctggaagtcagcgtcgagcgccggccgtattcgagccggtcgacctcggtcgactcatcggctgacgacgaaggaccgcccgacatgcgctccgagccggtcgacgcgcctgatgacaccgccgccgaggacgtcgacgacgaccgccggagctgccggacgcgggcgttgagttggagaaacagcatgtggtcgaggacgagcgtctttgacgagtagcggaccgagtgctggtgcgtcgccgatggagccgctgctgctgctgttgttggtgatggcggcggaggtggccgctgggcgagcggaggcacgggcggcgccggcgccggcgcaaagtaggacggcaccggaaacgccggggcgggcatggtaaggtggaggaggaggagggggtgcgcttgaagagagacggggagacggtggccgtcagtctacgagcgagcgaagtcgccgggactgggtcgaggttcgggcgggcctggagacaagagggcgcttcgggctcgcgcgtcggcggcacgtcggcagccgacggaggtcacgcggccgtgagccggtgccggccaggagctcgcctctattactgtactttcggcctcgaagcaggcacacgacccattgcatgctaatactgctgctgcttctgctgagctccctctctctctggatgaagaccagccccgtcgagtttgcgaaacgagcgggcgtcgacgtgccgagggctgctgcgccgatcccccttctcgcctctgcgcccttcttcgcccgtcgcccgtcgcttccggccgcaccgcacacctgaaccctcctttcccactaggaaatctcgctccaaacgcaatgatctcgtcgtcggatgccgagccggtgcgctccttctctcttaaccaccactctctcccggccccagcacacacacctgactctcccatctcatccaactcccctcctgctctccctgctgccgccgcgatggccaacgcccatcgcccgtcgcccgcccggctcgccgttccggtcgacgctcctcgccgcactccctcgcccgccaagcagctgccgctcaagacgtcgcgcgagtcgtcctaccttcaggttcgtccttccagccccgcagcagcagcgagaaggctgaggcgctgacgcgtcttcctgctgtcccatctcgctcgctcgcctccagtcgctctttgtcggcctcgccttccacacgacaccggccaagtcaggcgtggaagggcttgacgacctccactggttcatcgccgtcagcgacggctttgcgatccagaactctgagcacggcaaggtcgaggcggtcgacctccggccgggctccgagggcccgcgcaagacgatcggccgtatcgtcgaccggctgaggcagtatgcggccagccagtcgtacaaggtgcgtcgccccgtgcgcctctgcccggcctcgcaaggaggcatctccaggagggccttcgtgctggcggtcccgctttccaggctgtgctcgcagcgaggctcgggctcgggctcggccgcctgcccgatctccccccttcgacccaggctgacaaccgcctctcgccatgacgctactctctttccagatccaactcgtcgccatctccgaggccggcctgccaaagtgcttcctgaccgaggagcctctccttctgccggccctctggcagaagctcgatgtgcgccctgcgttctgccccttttttttccctctggcttgacacctcgtcgtcgagccttggctgacgcaaccctcttgtcgccgctcagaccgtcccgttcctcatcccgctcgaggcctttgcccagccagccgcctcgccgaccgcctcgccctccgtctccttcttcccaccctcggccctccgccagacggtcccccggcggcggcacatcgacctctcgttcctgcccgaggcggcgaccgaccgggccgagggcgaggaccgtgcgcagcgcgccgtccgtgaggccgtcaaggcgctcagcccgctcgtcaagagtgcgacgacggtcgagacggatggccagacgggcgaggtcgaggtcgaccgcaacggccagatccagctcgccagcctcgccgactatgaggcgacgaccagccccgaggtcagtcgaccgtgccttctcgctccgaaagagcaagcctgctgaccgcaatcgtcctgcgtcagctctgggccaagtttctcgccctctccaagcacctccaggccaacaaaatcaaaatctcattcttcagcgcgaccccgcaaggcggcggcgtcgcgctcatgcggcacgccctcatccggctctggcggctcgctggcgtcgacgccaagtggttcgtgcccgaaggtcacccgctcgtctgggccattacaaaacagcgcttccacaacgtcctgcagggcgtcagcaagcccggcgtcgttctcgaggacgagcacaaggagatctttgagaagtggacggaggccaacctgtcgaccttctggagcgagggagctatcgagggccgcatcgtcgtcatcgatgacccccagcgtgcgtcctgggcccctagaccgctggctgtgtcgacgctgacgagtcaacgcgtctttctctcggctcggcagtctgcgcgctcatcccgcacatccgcgaacgctacccgggcgtcaaggtcctcttccgctcgcatatccagatcgacacctcgctcaccgacgtcgccaacgtcgacgccgacagcaaggacgcccacccggcgcgcgacgtctggttgtatctttggtctttcattcgcgaggccgacctttttgtcgcccatccggtccggcgcttcgttccaaaggtcgtaacagagagcgccatgcccgtcacctacatgccgccgtcgaccgagtgcgtcccggcctgcttctgactaccctgctttccgtaacacgctgatatgagcgagcgtcttctcgtcgcagcccgctcgacggcctcaacaagcccatcggcgcggctgacatgcaggtgcgaccctctttcctgctcctctgctcgcctctgcgttgatcacccctcccctaccgcccgcgccccctcagtactggcggcagtacttctcgcgcatctcggagcagcagtgcggcgtcggtgtcgactgggcccggccatacatcatgcaggtcgcccgcttcgacccgtcaaagggtgcggaccttgctcaagggccgtctgcttgcgttacactctggctgactcgtctcttctctccctcgattcaggcatccctgtccttcttgaggcctatctcgccttccgtcagaagctccggagtctcgaccccaagccgacgcccgaccagacgccgcagctcgtcatcgccggccatggctcggtcgacgacgtgcgttggctcgtgcctaccgaagctggccgcgacatcgtctaactactgacggcctggctcatcttttgatcctcttcagcccgatggtcagccaatcttcgaggagattgccgacatcctccatcaggaggcctaccagttcctccgcaaggacgtcgccgtcgtccgcgtgccgccttgcgaccggacgctcggcgccatcctccagggcgcctggtgcgcgacccagctctcgaccaaggagggcttcgaggtgtgtccgtcgcttctagcctctcgcacgagtgcttacccacagccgcccaccgactccaggttaaggtgaccgaggccgtccacaagcgcgtgccgatcatcatcgccgacgccggcggcatgccgctccaggttcgggacggcatcaacggctacatcgttccctccggcgagtcgcagccggtcgccgaccggctgttctcgctctgggaggcagacgagtcgccgctgccgacggttgccgcgctcgagcgcgcgaacaagacgcccaactcggtcgcggacgagactgtcggcgacttgctcgctcggccaccgcgcatcaacccaagcgcggccaacggcgaggtcgaccagtcggagaaggatgttggcacctcagaggacttttggtcggtcggcaacgcggtccgctggatgtgagttgcttcttcgcggcttgacagaccttctcgcgaccgtgctgaccgagggtttcgcttcccaacaggacgctattcgcccgtctcggcccgcgcgagcacaaagtcgacggcgtcgataagcttgcgaccatcctcggcgaggcccggtcggccaacccctgggagggcatcgagaaccgctccgtctgggagacagtcctcggcgagcgcgacgacaagctcgtcatcgattgagactggcggccttccatttttgacctcatgcatcagctgtaacaatacacgaaagactgtagccctggaatttcgcatgcccctctcctcttctcccgctcgtgagcaagtgcagggcgactggatcggctgctcgcccgcctccttgggctgacccaggcgcagcacgcccgcaggccaacgctccgtcccgcccaaccacagccctccctctccttcttccgacgacctgacccacatcatctcatcacgctcttcgtcgagggcaatccacctgagctcttctagctgacgcctcgactatggctagcgaagcctcccctcgaagcatcgcccagctcgccgacgaggccgcgtcgacgatccatttcagcaaccgcttctcatgccgggcctggctgcggtcatgcgacgccttgacggaccaggcgctacaggagcgcgcgagaggcgacgctgagcgcgagttcataggctgggcgagatgtgcgacgtgagtcggccggctgctgacgagtcgtgccgtcgagggccgccttggtcagggacgctcgagatggagcgggtcgtcgactgacacggctcgcgtcctttcttcctctctcgacttagcatcctgctcgagcatctgcctcagcaccctcagtggagggacctctcgtccgaagaacgcgctcagatccggaaggtcagccaaagcgaagcaacatctctccctccctccgagccgggctgactgatcccgcccgctcaccgctcgcagcaaggccactcgtgcctcgatcagctgagccgcctgaagcccggcctttcagatcgctacgaggcctggagggcacgaagccagcgggcagcccagacaccgccgcagtcgagcccgagcagccggtcaccgctgcccagcgcggctcgtccgcagcagcaagccgcccggtcacaagagcgcacgctcgaggaccagaagcgagcgctccaagtcggctcatcgtcatcgtcgtcctctggcccatcacgctatgataggagctggcaggacggccggtcggcctaccagacgtcgtcgaccccgcagccctaccggtcgcatgttcctgcagcgcacccgccctcggcacccatctcgtacccagcgctcgccgagccacgaagctccgtccggtcctcatcttcccaatcctccctcgctccatcctcatcgtacaacttgccgccacagacaacccggccaagctcgctacctccatcgcggcacccctccccggcagcagcagcgccgcaagctgcgccatccgcctcgtcgaccaccgccccgccgtcctgggccggcctgcggacaatgaatgtccccccgagccttgtcgacgcttttctgaaacggtcggccaaaaacaccaagaagcggatcgagacgtgtgggctcttgctcggcacgctcgactcaggcatgtttagtgcgtgaccggcccatttgtgcgtcgatgcggtcactctcgctgactcgtcgcccctttcttcgcagccgttcgggtgctccttctacccgtgcagaagggcacgagtgatacctgcgagtgcgtgcttgtgccgctcgttttggtctccgcgcagccacaacactcatagttctgccgccttgcccaggacgctcgaggaggaaaaggtctttgacttccaggacaagcgcaatctcttgacactcggctggatccacacgcatccgacgcagaggtgagccggagatcgtgccactcctgttggcggcccaaactgacagctcgcttcgtcagctgcttcatgtcgtcgctcgatctgcatacacactcaggctatcagtgcatgctgcctgaagcgtgcgttcgtctttctgcgctctgccattgcttcctcataaaccaacaaacgctctctcctccctcgcagcatcgctatcgtctgcgctcctcaggcgtcgcccgagtacgtccctcaacgccgaagaagcccgcatgtcgctgccacgctgctgaccgcgctcctctccaacagcctcggcatcttccggctgacggacccgcctggcctgcagctcatcatgtcgtgcacgcggcacgagaccttccatccgcacccagacgtcaagggcggcatctacactgtgcgtctcccgccccctgccctcgcgctgaaatggggcactcatgctgacggtcaaacggttgcggcgctcagggaggcttcggcacgaaggaccgaggctacgggcatgtccgcatgcgcgagggtcagggcgtcgaggttgtcgaccttcggcggtagcccgtcggctccaatgctgacgtcttggacccttctcaagagcctttgcaagagtctgccgaattgatatagatagcaagaacgtttctcccgcccgtctcaggcgctcccgaggtagtgaccgcgctggagcgtcatccagacgagcgaggtcgctgcgagcaatagccaaaggcgcgtcagttcccacagcgtcggaagaagcgtgtgagctgcgaagggatgacgtactggagacgacggccgggcctagccagcccttgccgagtttagtcgtccggtagatgaggagctccgaattgaagtgcgcaaaggcgatcacgtacgagtagaaggcgaggttgtacagcctgaaagcgacgtgcgccaaccagcggcgcgtcagtgaggggcgagccagacgcgtcgccaccgcgagcccaagacgcgtgagacccggacgcactccttgttggtgatgttgtaggccgcgtacaggcggatcagcgccgccgtcagcgtccagatgccgaaggtccggttcgagagcggcgtgactggcgggaggacgcgaggcaaggcgagccgcgccgggggaagtgaggacaggtcagccggccagccttccagcaacaagcacctgcctgtacgagagacgcaccctgctcgggcttgccgtcgtagaccttcttgctgagcgtcggcgagacaaacgtctggaccgtgttgaagacggcgacggacgagatcaggagcatccaggtcggcaggaagccgccggcgccattcgggagcgagaggtctggaaggagcgagtcagctgtcagtcctcaggaagcagcagctctgccggacaggaacgtactggagaggaacgacatggtctgaaggtgtcaggggaggaaagctgtgacggtcgggaggcagctctcgaggtcgcactctgaatccgcctctcgagctcggcaccctcccgacatcatcccccctgcctcccctcgcatcgccgtctttcactcctcgctccacgaccaagcgcgtgctgcccgcgtctcgccgactattccacccacccgcacctcacacggcctcctgagccacccggccccggtcaagaagcgcaagatgaggtgcgtgccggcgtgtcagagctgctgccgaagcgaggcgagcgagctcctatgcctgaccggacgactgactcggcctccaaccttgcctgccctgccagttcgccaaagcggcgcatcgagacggacgtcatgaagctgctcatgtcagactacgacgtccagctcgtcaacgacaacatgcaggtctgtcgaaccctccttctggtcggacgtgagggatgacgcgggtctcacgccgtctcggccgggacggcaagcgacaagctggagggcgtcgggcatcgctcggcaggcttccttgagccttaggccaagctgctgaagacgatcatacaacgaggcgggggcgtctagcctcgacggcttcggcccgggcgagttggtcgtcgccactcttgccacagccgggctcggccggcactagatagcgccggcatgcaggtgatcaaggccgccggctgaccttgccttgtcattggcccttaccaggagttcttcgttcgcttccacggcccgactgagagtacgtcagctttctctagcgtcgaagcgagtgccgccggctgactctctcatccggctcccttgctcagcgccgttcgagaagggcatttggaagattcacgtcgagctgcccgaccagtacccgttcaagtcgccctcgatcggcttcatgaacaagatcttccatcctaacattgacgagatgtgcgtcccggtttcgaggcgaaggggcgagcgcagtggctgaccgcgcgacttgtccgtcctcacccgacttgcaggagcggctcggtctgcctcgatggtccgtcttccgctgtgctgcttgctgctcccatgcctctgtcagcctactgacctgcgcatcttcctcctgatcgcagtcatcaatcagacatggtcgccgatgttcggtgcgcagccgtcatttcgacccggccggccgacctcgtctcgcctctttctgacacgatccgcccatctcgcctcccgcagatatgctcaacattttcgagtcattcctcccgcagctgatccggtacccaaacccgtcggacccgctcaacaacgaggcggcgacgctcctgatgcgcgatccgccgtcgtacgacgccaaagtgcgcgactatgtcgtccgttacgcctcgggaggcggcaagaaggccgatggcgaggacgaggatggcgacgaggaggaggaggacgagagcgacgacgggagcgagatgagcgacatgggcagcctcggtggtgaggacgagattgacggcgagatggacttgtaggctggctcgctacgccttcgtctctcagcgcttcgccatcgctcatgtccggccttgcaattccttcggtcgacttgccgtcgaccatacctttctcggcctcggcctgtgactttccgtccaccccccagtacctttctcccagcatctcactctccgcgcacacgctcgcctgtccctctgttccacttcccccctcattcctcacaccatcctctcacaccctctcgccagctatcctacgcccgcgcgcccacgagtgtcgcccggtctttcgccgtttcagccttgacgccctccacctctgtacaccgcctggccattgccgctcttctctctgcgcttctctctcctcgggactgtagaacatcatgctcttcttattcgctccctggaagatttgatcggcaagcatggagagcctcggcccgaagggtcgccgcgaataaggacgggcgctcggtcgggaccccctttctttccttttgttcgcctcgaattgggtcagccaccgaggccagagagccttctggcccgtctctcgggccgtcctctccactccgtcgaccgtcagccctgtctccctctgtcgctcgagaacatcctcctctcctctcgctcgctcgctcgaacgtacgcggacctgctgccgtggaccagactgccggacgaccgacggctcccaaagtgtgagtctttggtggcttgcttgttcgggagagctgtttggctcggcagccgggcgagagagccagctcgcgccagggccacgaactgccgatgggcagggatcctctcctcctctcgctcgctcgagcacaagtttgaaatcagcggcgacggtgacggcggccggttgctcgtggctttggaggacgaaggcgacagccctggccggccgcacggagcgacccgccacgagctgtcgctcggtcgctcggccggcgtgccagccctttgtgtggcaagcgtggaccaaggcggcggacctcctctcctcctgccactcacgatcccccaacccctttgaccacggcgtctgctcgtcgtggggcgtgatggccggcgggagagtcgatctggggtcgggcgcccgtctagacgcgtcgcttggtcgctctctcggagggaggcgagacgaggggagggctgacctgctgctctgccggtcgcctcctgccttttgctgatcatcgacgactgcccttgacctgttgccagctacctcctacactctgtcgctccttgacctgtcctacaagctgcttccgtcgctcgaacgaccgacctcgacacagcacgcctcgccgcagccgcgacctcgctcaacacccactcccttctcctcgtgctccttccagtaccccttcctcgcatccagcccgaccctccttcccctctagctctcatcgaatccgaaaatgggaggctgcgtctctgctgaagccgagtcacccgaggccaagcggtcaaaggagctcgagaaggccatccgcgaggtgcgtcacctcttcgcctttgatggcggccacccgtctcgacctgagctgcagatttcgggcgcaagcgagcaagagatagacgctgatccgagctcttgatcgtcatgtttgcaggatgagcgcaagatgcagacggccgtcaagctgctgctcctcggcgcaggagaatcgggcaagtcaacggtactgaaggtgagcgcccgtcttgtcctctcttctgctcgagccgctccgactactgacactactgcttgctcgtaacgcagcaaatgcgcctgattcacaatgtgcccttctcggctgcagagatggagcgtcagtctggcgcgccgccgagatcgacatcgcttcactgagctgacgccctgaccctcctcgcccccgacagactaccgccagctcatcttctcaaacatcatcaacggcatgcggacaatcgtcgacacgatggatatctgggagatgcgcgtcgaggccgacaaccgcgtgcgttctggccgtcatcgcccgtttgcccgctaagcttgccttcgctgacttaaacgcttgacccgaatggctcttcagcgcaacgtcgcgatcgtcgactcggccccggagctcgtcactggccagtcattcccggccgagtacaaggagccgctgataagcctctggcatgacccagaggtccagcggtgctttgagcgcggcaacgaggccgccctgccagaaaagtgagcgccttctatcgctcgctctgccgccatgtttagcaacctgacgagccctcctcgacgcgcctctctcagcttgccgtactactttgaggagatcgaccggctcttctcgccaggtttcatgccgagcgagcaggacgtcgtccgcagtcgagcaaagacgcttggcatcaccgagacggccttcaggatcggcgacctggtgcgggatcccctgcttcgcgtttgcaagaagcgttgaaggctgacggcgctctctcgtctgcagaactactcgatgttcgacgtcggaggccagcggtcggagcgcaagaagtggatccagtcagtcgctcgtcctcgccgctgtcacctgcgcaacacgcacacgatcgctgactcccgcctgctcttgccttccagctgcttcgagaatgtcaccgccatattgttcctcgtcgccgtctcgggctatgaccagtgcctcgtcgaagaccgcgactcgaatcagatgcagtgcgtgcgcgtgcgagcacgacagtcaccttttgtgcctgggctgatcgggttctctttcgctactctcagggaggctctcatgctgttcgactcggtgagctcgtcgtcggcgggtcttcgtctgtgtgatgtccttgcgctgacgcttgtcgcgcctcctccagatctgcaactcgcagtggttcgtcaagacgtcgatgatcctctttctcaacaaggatgacgtcagtctgctctcctaagttcatgttcctccggctacacttattgacaacctacctctttgcatccgccagctcttccgcgagaagatcaagggcccgtcgcagatccacgactacttctcggactacaccggcccgccgcacgactacatccagggccgcgacttcttccagaagaagtttacgcgcctcaaccgaagctcgaccaaagaggtctactgccagtgcgtgctgcctcttttgtcttgctgatcgcccgccgctgacgtctcgtgctgctctcccccctagcttcacgtgcgccgtcgacacaaacatgctccgcgttgtcatggctgccgtctcagagtgcgtcttgcgtctagccagatcatcatgtcgctcattcactgacaacatcccttgcgtgccgcagtatcattgtccgccgatctctgacggaaatggccgtcatctgagcgtgcggtctcacgtttctgtacccatctcgctcctcgtcacctatatacgcatactaggcgcgcgcgccctgcccggctccggatgctgccccgactcttttagaccgtcgcctcataccctactgtgcatctttgccatctgtcgtcgacctatctatcgctttttgtgcttgacgaatcgcaaaacggtcgagcgagcggattgcaggggccggccctcggcgcagccttgcctcggcctcatcacgctcttgcatgctcagcctcgatcgatttctcgcccgctcctcgcagccgccgtgcagggacgaaagcataagataggagattctgcgcacccgaccctcaacagctgaccgaaacgatgcggccctcgacctcgcccagcttggccttctcgcccttcgaactccggccgccgaggatgagcgcactgagccggtgcccgtagacgcagccagagtcgagcccggcgctgaacggcttgatgtcgagtccgcggccggcggcgtggccgtagatgacgttgatcgggtagcagctgacgcccttcttgcccttttggagctcagcggccgcttcgtcgtcgtccgcgcgcgtgcactcgcgcatcgaccgattccagatgtcggaccagggcgtgccactcttgccgtcctttgtaatctcgccgtgcttgaggacggagcgcatgttgatgagcgtccaagggtccgcgttgggcgcgacctcggttaggagcgcgagctcggcctcgagccgcgtcaggctcgacttctgccaggggagctcgacgttcttgcccagagcgtcgacatcggccgtcgcggcaccgtcgaggctgaacttgtggccgtgagggtcgaacgggaggaggccggcgtgcaccacgatcgtgtgaagagacgggactggagggagcgagcgggcgaggcagtcagcgagagacagcgcaggcgagacccagcccgacagggacgtactgtggatctgaagcggcaggctgagcaggtaggcgtaatcgagccgcgtcatccggcgcgcaatctggaagtgctcgccctcccagacccattcctttgggatgggcccgagcctctgggcgtcgctgagcgacaggttgctgacggctgttgcgagcgcttcagccagctcttcctcggtgccagtgaaggagctcgtcggaaggtacttctcaaaccatgagcgccactggatgacctgtgggaggcgagcggcgaacgacaggcgggtcgtcagtagctcgagcgctgacttgtaagagaggacggcactagccggctggtcgtgattgcctctgacagccttgacgccgagcgtccgcatctgccggaggacctcaaggggcttcggccctttcgcgacgaggtcgccgaccgagacaaagaggtccttctcggcgtcatagtcgatcttggcaagcagcttgccgagctgcttgaacgagccgtggatgtcgccgacaaagaagacgcgccggtcgggctcgtcgagccggagctggtcggccgagagcgtctcgagcaggtggtagtgcgagtgatcgtcggcgactggcgtttcgagagaagggcagccgtcagcgactgcgcaggcgaaggagcaaagagatcgaccgcgattgaggcacggacaggatccaggctctacggccgactgggccgtcggcgcgctctcgtcgtcgtcgtcctcaatcttggggtcgttcgtgacagccgacgtaaggacgcctgcggcggagctcgcggcaccggcggcgtgcgcagctccaaagccgccgctgggcagcttgctgacagcgctcttgtcgccgccaaggatggcggtcccgacgacggcgacgagaaagagtgcgacgacgaaaaaggcgcccgaccgcctgtacgcccgccactggtcggcccgcgaggacgaggccggcaaagggaagagctcgtcccaggcacgtgggtcgtgcttgagctcgttgaagctaggcgacgagcccttcttgtcgcccgaacgcggctgggagccggtcgaggaggccgaagacgagacacggtggagcggcacctgccggccgggcgaatgtagcgaggtcccgaccgggacatagtgcgacgggagatcggtcggcgaggcgtacggcgacgagcgcgtcattgggcggccgtatgagacggtatggacgagtcgacgagcgggcgacggctcaagcgcaaaggacagaagtcggaggaggtgcgagcgagatccgagagggccctgcgtggatgctgtgtacgagagatgtggttgggtggaacgagagggttgggtcgatgctggaggttctgctggagcagccgacgagcagctctcttgtcgagccgcccgcccggactgcctcgaccacaaccccgacttccttgccgccgcccctctcctcccgtacgtttgccagcagcaatgtcgggctacaccgtcctcatcgtcgccctcgtcatcgtaagtcggaccgggtggtctggccggtcgtttgagcgagttcgagcctgaatccccctcgatttcacctgcgcccatctccctggtcgctcgtccgcccggtcgctcgtgctgcaggccgccatcggcttcggcacctggttcgccgtccccaagggatcgagccagacgtgcgtcgtctctgaaccgggtgctgtgtcgcttcctcgaagtgagctgaccgacgacacctcgccttgttcgacctaggctcatccggacaagcgtgctcgtcgccctgacatcgtgctaccttatgtccgtcttggcggtcgctacccctccctcgcttgtactcggccgctgacgctatctcatatccaggtgggccatcacctacctcgcccagctgcatcccatcatgtgtccgttcgccttcctacctggccgcccctctccgaccagagctcatacgccgctccctcccaccccctttcgaggagagcgaggaggagggcgggggcgaggaaggcggtggtggtggtggtggtggtgagggcgaggaggatggacggtcgacgcgagggaggaggacgggcaggaagacgacgtgcgtccgcctgcgtttctttcgaagatccgcgagaagagctgaccgttggcccacttcgcacccacaccaaccccatcaccccagatccaacaggtccgactcgaacgcgggcgacccgccccatccgtccaacgcctccggctcaggctcgacctccatcgcgcccgcagggggctcgacgaccgccgctagtgcctacagtagcggcggcggtggcggcggcgcgggttcgtcgacggccggccagaagcgcgggagatccgagggtgccagcggcgggcggggcaaggcgagcaagaaggcgaagaaggagctgctgccggctatcccggatggtttgtcctccttgcttgcctggcaagaaacctatttgctgacttgatccccgatcgttgcagttgacgccgacatgaacgggtcggagtctgtctcgacggcgacgacgacgagcgccggcgcagcggcgagctccggcaaggtcaagcacccgaaccagtacacctaccggcccaagggcgcatcatcctctggcaacggcgcgctcggcgcaccctcgacggcgacgggcgtcaacggctcgctccctgtcccgccgcttttggcgtcgccgacgaagacgaaggcgggcgagggccggcgctcgggcggggccgcaaacgccaacggcggacgagccggaacgccgctcaacgacgccggcggcagctcgcgaaccggcgggttgtcgagcggcgcgtcttggggcgtccccgatcacctctcgcacctcgcgccctcgatcctcccctcacccgcccccgtgccgatccgcgtcccctccgtcggcgtctcgtcctccggcgaagtccggcgcgagacgcgcgacgagaacccgacgcgcgtccgctggccggggaggcggatgacgattggcgaaatgcggaagcgcgtccgggggattctggacttcgttgggagatggccggcggacgcggcggcggcggtggccgctggcgaggaggacgctgtcgaggagggcggagacgcgacgatggcgatggcggcgccggcagacgatgacgagcccaagccggtccagccgcctccaataggcggctccacccaagacgcctctgccgccgacgccgggctcccagccaagctgccaaaggtcaagtcgcgggctgacgaggtcgaggagctcgttcgcgacttgattgccttcgagcagcgctttggcgttgcggcgctacttgcggcgagcggggggtcaacgccggcgccggtcgctgcgcctccgacgacggcggcccctgctcaggcgagggagacgcccgaaccggcgctgatgacggcggttgaggacgtgtcgatggaggagtcgcaaccggagccaaaacctgagaacgctgggccgccgccgccggcacctttgacggccgagcccatgacaaccgaggcggagaaggtcacagactcgttggccccgacgctcgtcggcctcggtctgataccttcggactcctcgacggcggcggcggcggcggcggcggtggcagtcgacaacgatgccgacctctcggcaatggacgtcgacccgcccgcgcagctcgactcggccgtcccctcggaccaggctgcaacgtcgaaccagctcgcagtctcggtcatcgcacctctcgagccgacaacggcacgcaatgctgagccgctcgccgagtcgtccgtcccgtctccatcggcagtcgccgcccctgccgagttacagccgccagccgagctcgccctttcgccggtcaaggcgctccctctgtcgatcccgacggccggaaacgagcatgttgcggccgttggcgtccccgaggccggcgcgctccaacgctgagcaggacggggcgacggcatcgctcctcgccgagacgacgtcgtagtgctctttccgtctccttcttctctgtcatatctctccatcccttaattcatccacctcgcttccctcttggatctcatgtgtcgacggtatgttccgttgagtcgccctaacaggacgcgtcgtctgcccgccgtcggcttgacttcgcccgcgcgctcccggcggccgcgaccgaccgcctcctgatctccctccgacccacgatctcgctttgccctccccttcgcctctgcaactctcttccagcactttgagagcatcgctgtacagcgcctggacctgacctctacgactcgactcttgagccggccgtagcctgcggacgaattacctcggcaggccgtcgacgacacccggatcaacagtcggctgccccgtctctcaagcgacgcgccggccgtcgcctgtgacctggggaggatggaccgaccagggctggccgacggcggcccgctcgctcgagcgtcgtctccgccaccgacgccaacgtccttcgccttcgaccaagccaacgcgaccgtctctgagctggcagcctcgctctcgaccgcgagccggcgcgtctcgagcgaggcctcggccgcgagcagcagcacgcccgggaccgccgccgagtgggaggaggagcgccgggcgctggagcgcgaggtcgtcatggtcgctcagattggccaggcgctgctcgagcggcaggaggcctaccggctcaagacagagaaggagctcgaagggctaaggcagcacgtacgttgcgctccagctccggcctgagagagtaccggacgacgactgacccaacactacacgtgggcctcctcaaatcttttccctggcgtctcttgcgacgcacgcgcagaaagagcaggcggccgccctcctcctcgaggccaacgaccagctccagacggcccggcagacgaacgagaacctcgtcgcgcagctcgccggctcgacgcgcgagacgggcgcgctcgagcgccggctcctccagtcgttgacgtcgctcacgctgtccgactcgtccatcgccaccctccggggcgagatcacctcgctccgcggtgcgttgagcaagcaggcgggcgctcaggcgcgcagcaccggctgggaggataagatccgtcaagccgagaagcaacgcgacgaaaacaaagaggagctggtcgccgagcgccggaagcgggtcgagagcgagcgtcgcggccacaaggctcaggagcgcatctgtgaggccgcctcagctcggggcatggtcgaggaaacggccagctgaccgaccgccttggccgcttcttactttgcagccgaactcgaagtcaagctgaatgctgcgcgacgcgagattgagactgctagccggaccaaggaggagctggtcgaggacgttgcgcgacaggtcaaaacgcgaatgcaaggtcttcatgaggaggtgagtctcagcacagtctctcagtgtctcgccagatgcttaccgtgctgcgacgcatccgcagtggtcgtcgcaagcgaacgccggcggctcgcccaaccccgaagttcaacaagtcctcgagggtctcatggcagagaacgtcacgctaaagggcgacaacggcgagctccgcgacctcctcaacgagtatcggcagacgcacgcaaagtcgcctcacaccgcccactttgaggcctcaatcggcggcgattcagccttctcagatggcgaagggcaggccatcagccgttcgtcaacagccttcttttccgacgagctggccgcttcgaccgcatcgaggccgcatgttgatcggacccactcagccgacgcccctggtcggtactcgcacggccgtcaagactcgtgggcgccctcgatccgctcagcctttgcagcgcagcaccgacacggtcggactgactcgtggacaccctcgctcgcgccgtcgtacgcttcttcctcgagctacggcgccggaccgggctcagtcggcatgctctcgccgacaggccaggacgaagagtttgacagctcgggtctcggcctcggctcgtctggctttccggccggcgggaagaagggcatttactctttgagcggctcggcccgcaggtttaaggacaagaatggctcgtcgtcgtcgtcggccgggccgaatgcctggcagcgaggacacgtaaagcggagcttcagcgtcgatcggccgcgcggcgtccagcgggcgttctcggttcgtttacgcccccaacctgtcatcctctacccagcactgactcattgctgaacgacagaacgtcggctcgattgccgaacgttcagcgacagacgacgaggcgacagcgtcagcggccgacacccccgaggtcgatgccttctctccgtcctcgctcgacgccggacggaatctcgctcgatacgatatcggtcgccgttcctctgcgccgcccggaccagatgggccacacgcgtcgtcctcgcaggacctgtcgttgctcacgctagacgacctcggccagccccaaatcagccccgagaagcgcaaggtcaggcgacggccgatgctcctgctgtccaagactaagggcgttcagaccgatcccgtcgactttggcacctcgaccgacgacatcggctctcgccctccgctacgctcgcttcatcagcctcggccttccatttctccttccgtctcgacaacgacgtccgactttgactctcgtcgaccgccatcccacgcctcatctcccaccttgccttcctacacctctgctgccggcacctcctccgacgctagtcaaggccccaacgacccgcgcacaattgccctgacttcactcatcgaccacatggcccgactactcacgcggctcagccaagccgacgtccagaccctcacaaagcgcctcaagcgccagcatctccccggtgacgtcggccacctctcaaagtcgacgctctgctccatcatgagcgagatcgacgaccttcggaaccacttccgcggcatcctcgaggccgaacgcaagcaggactggggcgcactccactctgctgccgacaaggagaagctcgacagcctcgtcacccgcaaggtcaattccttcccagcacattctcgttcgcattttcctttggctgacggtacacctccctcaacacaggacttcctcgccctcgtcaagctgttcaaggatgtcttcactgagctctcgaccctccgcctgaccgtcaatgagatcgtgctcgacccagcgagcgctgcgaggctccgagagcgcgtgctcgccgacgaggaggacgagacgattcgaccgacgcttaagccccgcaacacctcgggcctcggcggttggatttcggctcccatctcaaagttcttcatcactccgccggttgagacttcggaagacgactcgtcgacgattggctcgggcaaactctcgccgagcggcacatcaggcatcggcaacggagcggcggccgaccggggacgtcttcacccttcgagagccgccccaaagctcgctgctgcgacggcctcgactgcaacgacggtcaatgtcgagtttgcctcgggcggcgccgtccggcgagcgacggcgacgacctcggccgcagctggaccagccgcagcaagcgacaggccagactcgcccgtcatccgacccccgtcggcgcagggtctcgcgccgccgtctgaaccgaccgtccgatcagcgagccctacccgaccgtctacctcgaaccgggccaacctccgcggcatctttgcgggcgcgtcttcgtccggctcggcggtggcggcccctgcaagctcgtggctgatggcgagcggcggaggcggcggtgcaccggcaggccgactccgacacgctgcgagctcttctgtcctgcgtccggctcgagccatgccagctatgcccctcgggggctcgccgaccaagcggatgtcgtccgccgtcgacgccgtccttgatccagccacgagctcggcgatcggctctaatatctacgagcgcaagctccgccggacagcctcagacgagtcaatccgttcgcattacctcgagccggcagtcggccctgcagctgctgctggtcactcctcactcggccgcggcgcaccgcccttcgtcacgcggaagccaccggcagcgacgcggaccgcctcaggcggcggcggaatgttcgccaacctctcatcacgcttgctcgcctttgccggcgaaggctcgagcgcatcactcctcgccggggccgactcgctcgatccttcagcggcctacgagtcgacctcgtcgccgacgtcctcggccggctttacgccgtcctcgctcgcccggccgagcttcctctcgtcgagaggcagttctggctgggacgatggccgaccagtctagtccttcttgcgccctcttagcgcctattgtcaagtatgatctcatgaccccttcccttcctcacgagcttccgtcggggccagggccgattagaaaggggcagcctcaatgcaggacttagacgggactgtaaatgaattcgagcctcaggcttgacgcgcgccgccgccgccgcctcagccagcagcggcaggacatctcgctccgtccttcacctcttctcctcctttcccgcccccttctccctctaaaatgtccttcgccacgcgcacgctccgccctgtcgcccggacgctcgcccaggccggcccggccccgatccaggtccgcaacatggccaccctgcgcgagatcgagatgcggtcggtccctccctccgccgcgccgcgcgcccttttgctcgaggtcggccggttctggaaagagctcggccgagcgccatgctctgagctagacggccggaccgggccaggacgctccgcgacgaggagctcgcgctgacaatcccgtttccgctgctgttcgtccaggctcaagtcggtccgcaacatcgagaagatcaccaacgtgagtgtgctcgtagctcgcggccgcctcctctggcccgcccggccccggtttccctccagggctaccttgcaggttgcttcaccagtcgaggcaggtagggccaccctgttggcgtacgcgggaagcccgcaagggttgtagagagatggaaggataggcgagggcacggggggaggtcggagggagcgtctgggttgcgggcgagcgagctggagctggagctggagctgctcggccgtacgccgtcgagagcccgcgcaccacagtggcgtctccgtcgcctgccttccgacgtgcgccaggaggagggtttgctctgggagagctctcggcgctgtgctgtgcaggttggatgctcggcatacgcaaggtgaggtctggcactgacgtcttgcgctccccgctcctcgtaacgacgacccgacccacagtcgatgaaggtcatcgcctcgacacgtctggccaaggcccagaaggccatgggtgttgccaaggcctacggagaggccaacaacggtctgtcccccgtttgcggtcgggctgcgcgactcccgaacgcgtcagcgcgctgacctttcgtgcgcacttctcctgctgcctccggcacccgcagagatctttacgaactcggaggccaagtcggacggcggcaaggtcctcatcgtctcgatctcgtccgactcgggtctctgcggtggcatccactcgtccatcaccaaggcgaccaaggcggccgtcaaggagtcgcccgaggcgtccatcatggtcctcggcgaccggcccaaggcccagatctcgcggacgatggccgacaagattgagctctcgttctcggccgtcggcaagagcatcccgacctttgcgaccgcctcgaccattgccgacgagatcctctcggccggcgtcgagttcgacgaggtgcgctgggttgctcgaggggaacgtacgccaggagatgctgacgcgcccttcccactcgcagatccacatcatctacaacaagttcgtctcggccatcgcctacgaggctgtcgtcaccaagatcctgtccgagaaggctcttaccggcggtggtgcgtacttgtggcgcgacgctcgcacttgcttaggggctgcgtcggtctgacgcccgcccccttcttggctcaccctgtcgtcgcttcgctctctgctgtgcagctggcttctccaagtacgagctcgaggaggacgttaccaaggacctcgtcgagtttgccctcgctaacggcatctacgccgccctgattgagggccacgccgccgagatttcggcacgacgcacggccatggagaacgcctccaaggtgcggctcggcttgtctcgtcgctcgagggtgggggtgtgtgcgcaagctgctgccggaaggcgtcgcgcggtggtttcgcaccccccgtcgaggttgagcacttgccttcagtcgcagcgactgactctcttgtgtactgcgccttcacagaacgccaaggacatgatcggctcgctgcagatgaagtacaaccgtggtcgccaggccgtcatcaccaacgagctgttcgtcgcgtcttgctcgaggctgcgctcaggcgttggcctctccgtctcgtttcgctgggctgtgctaacttcttttgatctccaccttgcccgacgcgttctcctcaatcagcatcgacgtgcgtcccgactgcgtgctcttccagtcttcgacgacgagcccgagactgaccactccctcccatcccgccctcgcagatcatcaccggtgcctcggccctctaagcaggcccgaccgcgacggacgacgacgacgacgacgacagctgctgctgactgtgagacgggagagaggacattcgggagcttggacgaacgcgagggaggcgggggcgcggaacggcccctcccccttcgtacggtctagacggatgccaaacatgcacatacgattcactcagggaaggggagcagggtggcgcgagggcgctgactggctgtgggcgtgcgcagattcctcccacggcgggtcgtacgcgagcagaggtcgcccaagggtggcgtgcagccggcgaaagtgttgcttagctccgagctccgaggcgtcggcgggcgctcccaagcacagtcgcagacctcccacgagtcctcggcttcacgccattcgtcaatcgtcgtcaaggaggaaaagtcaaccgattcccgccgtcgcctgatcgttgactggcgtctcgcctccatctgggcaccgtccagcttgtcccttggcacgaccgcttgttcacacaaagcgccctctaaagcgagcgacggagcaatcgagcttagggcttaagtggagagaagcggcgccaaggctggccgtctggcagatatgggaaacgggcgtgggtcttgtgcggtgccaggggcaatgggcgtccgtcgggcgatgccagagtgcgagccttcgggctgtttaaccgtgcccctttaaccggccggccaccttagccgacgcgcttgtcgtcaagtcaaggacgagcaaggttgggtgtcatgcgacgtgccgagagatctggtagtagcaaactgcagatgtcgctagcgaccacaagtgagcgaccctcgcagatggtccctcttggacggtcgattcgtctcgaaagctggccggagagggcggccgcccggcgtcgtcgtcagctgcaggaagcgccgacccggccggcacaagagatggctcgccgctttcccacgggatgcagggctacggtagaggatgggtcagctgcgaggctcggtcagtgtactggcaggtcgctgttgtcggtcttggcagttggggtcggcagggctgcgaacgcgatgcagatcgagccaacggtgctgtcttcggacgcacgggccgctccctagatgactcttcgtcggcctaggcaccgcagacgacgttccctgccctctgacgtcctgctcatgccctctttcagtcattctgttcggtttcatcgactcgtgcatctcacttcagggcgggttcttgggtcagttgcccaatcatcggggaaacaccggccgcgcgcgcgcagaaggcccgcgcggggacgactcccgagtctgggccgaagctccgcgcgcaccgttgctttacctcaccccgttgtcaactccaagctcgtcaaggtgcgtgtcggagcgctgaacgtatcctcagagtgcaacacctgacatccagtactcgttacgcttcttgtcgatcccgtttcagatggtcaaagtgcgtatctcacaggcatcagtggggagctcgcagcagcagcaggagctgacctcgccgcaatcacctcctcttgcagggtgcgactcgttcttcgctctttcgtcgagaccatcgttggggaggagcggcatgctgcttgcagggatcaggctggcctcctgccggctcagttgcaaccggcccagcacctgcgggcaggcggtcaggcgagcgcaggcaccagcagcacgactggcagtggtcgctccttggcaggcatcagctgggcaggcctcctttgggctagcagcctctcctgctactgctccggctccaacaccgccggcgtcgcccggcgcgcaacctagtttggcgggcgctgctacgggctggaggaatgctgtcggggccggtcgccgtgcttgcttggtgccggctgccccgacgcggcttgtctcacgggagggccgggtgctgctggcagagcctggcgccgccggggaggagacagccgtcatggcgtcgcaggtcgagcgggacatgccaatctgagtggtcgtgctgacccggtcgttcctcccgaccgtgccctcgccagtttacaagcccggaaaggtcgccgtcgttcttgctggtcgccaggccggtaagaaggttgtcgtcatcaagcagtacgacgacggcaccaaggagcgtccttacccgcacgccatcgttgccggcattgagcgctacccgctcaaggtcaacaagagcatgggcgccaagcgcatcgctcgccggagcaaggtcaagcctttcatcaaggccatcaactacacccacttgtacgtcgccactgcagctagctccgtaaacactcctctcggcctcccgactcacccaccctgtgctccctccgtcaggatgccgacccgctacgcgcttgacctcgaggccctcaagggctccgtcaccgttgagaccctcaaggagccgtgcgtgcccccggtcgctgccctcatgcgacgcccgaccacgtcggctgaccctccacacctttttccgttccctcttgcagttcgcagcgcgaggacgccaagaaggccatcaaggcctcgctcgaggagcgctaccagaccggcaagaaccgctggttcttcgagtcgctccgcttctaaacatggcgtgcggcttttcctgtctcctccgcgacactgcgggagggagatggtcatgacttctggacgacgaacaacttgctcgcgagacggagactggctcgggcaggcggagaatgagcgaggggcgcgggtggggactgcacgaggcggaggggagggcgatcgtctcggggattggaaactggcgcttttccgctagagcagacgaaggcggagtaggagctgcagaggggtaattgtctgagctcagccagtacaagggctgaaggtcgtgacgctcgttacaggacgcatcgatcgcacacgagaccccgcctcagctccgcagccaagcattgttcttcttgcgcttggcctctttctttgccttgaaggcggcctgcagtgcaaggcgaggacaaggtggcgatcagcgacggggcgtgcggggagatgcagcccggtagacagcggacgcaccacctcctcgcgcgtcacccgcttccgcttgctgccctcctcgcgctcgcgctcgaactcggcctcgtgttgccgctcccactcggcctggtcaaagaacgcttcgttctgccgccgcatccgcgaaaagtcactcaggtgctcaggcgcgcggttcggatccgactcgtaccggccggtgcgagagttgaagcgggcctgggcggtgtaggctgacgagccagaggggttgagcgggttgtaggagggtgggacgaggtgtgccaagccaggatggatgccagcggtagggtcctggccgccgtacgaagacgagggaccggtatttgcggaagccgcctggccgccgtacgagaaggacgaggggccggctgcgcgcgagcccgccgtcgaggccggagcagcggcactcggcagcgtctctacggacgggtcccaaggtggcgactcggctcgtgagccggaagaggtctcaggctcggctgcagaggtcgaggccagcgggttcatccacgttgtctccatcgtctgagaggcgagggagggtaggcactacgtcaaaggcctgcagcggaccgaccaggagcattgctggaacacaccttggtgttgtagaagtagtaggctgcagaggaaggacgtcagcacccggccattgcacgtcatgtgtggactcgagcgcgtaccgttctgcggcgggctccagacggcctgccagtcgtgcggaggcggaggagcattgacagcagcagccggctctgcgctctcgctcgtcgccctccctttacccttggcggctgatgctgcaggccgctcgtcctccgagtctgaggcgtcctcgaccgtcgcggctggcggtttggaggccgccttggtgggtgcggccgaggtcaagggtgaaggtgcggctgctgctgctgctgctgctgctggaggggaggcggctgagctcgccgatgctgacgaggttgtcctcgatgcgtctccctcggccgcggtcggcgaggtcggatccgacatgctgctgtgtcctgctagactggaagctgggcagagagagaagagggtcggagggcaaggtggtcgtcaggcgagagatcgttgagctcgctggacgcgcccttccttcgcccggagacaacgcgctcgaccatctgtctgaccgtcactcgcccctccgcccggcaactgctccgaactctcatctagctcactcatcgggagcatggccacgccctcctctctcgctgccgccacggccgcgccagaggagaacctctggtcgtcgatcctcaacagcgtcgtccagtcgcatgcgagccagcgccggcggacgctcgtcgtcctcggcgagcccggcgccggcaagacgacgctcgtcgagggcctcgtccagagcggcaagggcagtcgcgccagcagtctcggttggtgctcctttacctacgtgctctttagtttatcagctcaggagggctgaccagcagtgtgccgacctccttctctgcgttctgcttcttcccctttcaactgccgctcccgacgtggccgctgctggcccctcacagtcaagccgataccgatgccgcagcaactcaagaagaagctcggccggaccgacctcgccatgggctacacctggtttgatccgcgcgaggagggcgacgaaggtgtgacttcttcatgcggcttgcgtctggcgcaggtgatgaaggctgacccgaccgcgctcgtctcgctcgttcggctctccatcagagacattggcgccgctatcgatctacgtgccctcctcgtcgcattcctcgcatctccagctcctccctcgcatgctctccccgccggatacctctgccggcccgtcgacgagcaacgcgaaggacaagactcagcgctcaccccaggccgagcgcgacgcgcgggccgacgtcctgcgcgatacggccgtcatgatcgtcctcgactggacaaagcccggacgaatgatggaagacctcgtcggcgcactcaattggctcgatgcgtttggcagggagatgggcggcgagcgcatcgcggacgagcagagggcaaagcgtgcgtcccccgaagccaggccgctgcgacgcgaccggtgcgcagctgacacttcgagtcgctgctccttctgtctctcagtccaggccttcattcagcactacgctgagccagcgggggcagcgacgccttctgctgccaacgcctcgccaacgaagccgtctgccgccctgccggcaatgccgccgacaccctctcgcttcgcccacacctcgaccgaggttctcccgctcgggtccggcacgctcacgcacaacccgtacggcgttccgctctttctcgtctgcacgaagtcggaccagatcgacctcgtcgccgaggagctcggcttcaccgcgggcggcggcgcggcacttggcagccaaggaaaggctggcaagggcggctgggaggagcgcaccgactgggtcggctgtgtgctcaggacagtcggccttctgtgtcagtctctgacgtccgcctcaatcgccgggtatgctcgcaagctgatctcgcggctctctctgacgctccagacggcgcctcgatacaccacacctcgaccgtgcacccggcgacgctcgccaaccttcggtcctacgtcctgcatcgtcttttctcccctccaccgccagcaacaacccgcttcccctttacgacgcgcgccgagattctcgaacggccgacgctgctcgtccccgccggctgggactcgtggggcaagattaccgccgtcaaggacggctttgacccggcccacattggcgagacgtggaacctcgcgctgagtcggcatcggaaggagattgtcgggaacgatcaacgtgagggcgaggatgacgaggaggtggatgacttgcgtgacttgtgggaggaggtcgtcccgttcgtcgacggcggcgctgaggtttgtcctgcaactcatcccacttggccgagcttccgaagctgacgacgacatctccttcccctccccctcccaatgcagagccgaccgccgccgagagtctcgacgaccgacgccgactctgccttcctctcgcgccactacgagatcctccagaaggagctcgcacgcgacccgcgctcgtctttccgcatcgccggcggctcgagtgatggcgagcggacggccggcgtcgtcggcccgttgggaagcggagggctgtcgcttccgggcgtgcagcgggccctggcagagatggaggggacgtcgacgtccaacggcaaggtgcgctgtctttgcatttctctcgcaagccaagagggagggccgcgaagctgacgtcttgctctcatcgacgctccaggagtctctcaagtcgagcagcctgccttcgccctctctctcggtaacagcgccaggttcctcgtcgtcggcaacctcgccgctgacgtcgcctttgcctggcggcgcaaacggagccggtcagccgccgccgtcaacggaagctctcgtgcgccaagttcgccgtagatgggtctttgctcaaactgacgcatccctctccttgcatttctctccgctctcagcacaactttttccagtcgcttctcacgaaccgaaagaacacgtcgctggccaccctcccgaccgcatccactggaggcgccggcggtcctcccgccgcgcgcgaataactagacactctcttttcgcttgcccttgaactcttcgacacgaaccctggctcggcgcagaccgcccggctcacgatcacaatgcccacttcttcgcttcgattcgggagaggacatggggccgtgtgaggtgggagtttgaggggcagtccatagtcaagaggggtcggaagagggagacggcaacacgtcgagcgcatttcaacggacgatgtcgaatcggattgagcggaactaacgcagatcctcgttaggagagttgtcgatcaaggcagagagcatacgagtcggcgagcaaggaaggtaggactagagaagcaagcgagtcggtgcgaggtctcggtggccgacagcaagagagatgagacgaggtggctcgtgaagcagtcgactaaaacgtgagaaggtaaggccggaggaggcaaagaaaatgtgagcgggcaaggaagaggtcagcatcaggtcgagaaggggcgcagacgagagtgaaggaggacgcacggggccgcaagcggccgtcgaggttggtcccacctggcatcttgaggcctgcttgcccgccggaaggtcgtaagacgtcggaggccagtcggaagtcggccggagggttagggcctgcgagtcttggccgagactggagaaagcgagagtctgcgagtcgagcggaggggggagcactgcggctgaggtcagcaagatacgaggatgcggcagggaagagggcgactcaccttgaaggaggagagggggccggcgtcagctaagcctccggtacccggtagcccatcgatcggcaggggaagagtgtaggtcgcaaaggaggagagaatgttggtacaggaaggcgagacgcgccggaccagccgacgcgctctgggagtggttcggtctgtgcaacgccaggctccggcaggacatggcggaacagaaacaaggagacagtacaggagcgccgatggcaggctgaaagtggaaagggaagagcaggccagttagcagcgtcgtcggacttagagtcaggcgagagaacgcaccttcgggcgagagcacagagacaacgggcacgagacggcacagaggaacgagggatggcaaacgcaaagacagagagagagtgcgaaacgacgagcggtacaggcgcatgagcagtcacggtctgcgagtcgggggaggagaggcgacagaagtcagcagagtgatgcgactgagagtcagaagagcaggaggcacttacctttgcagagtgtcgaaagacaggccggcaaacgacggaagaactgaggcagcgacttgtaggtgtgcacggggagagcttccgagtggcgcgacggaggcggacgagacagcagagggcgagacggcgagaggaggaggacacatgcacctgagtcggcggaacacgagcgaagcaggcaggagcagatgcggagcgaggcggcacgagacagaggagacgtcagcgacgcatcttgaacgacagacgagacccgagacagagacgcgaggcaggaagcgaggcagagacacgcaaggcagcagaggaaaagcagactgacgcaccttgctcggtcgaccgctcgggagggaagcggagacaaggcacaaggcgagagaagagtcgatgacgcacctgggtcggacgccagaaccgcgatgggaacgagagctggcacggaagcaggaagaggtgaagcagaggacgcatctggcttgacggacgacaggcagacaaagaggcaagaagcagagacgggaacaagagggagaaaggtcgtcgacgggcgtacgacccttgaaaccgagccgccgagagacgagccccgaccgccttccgtcgcgtcaacgccccacgcgcctgacgggtgtgagagagcaagggccgacccttcatctgcgcgagacgacaggccgacccctgagccgagcggtcgaaagacgcgctccgaccgccttctgtagcaacagcgcctgccgcgcgcctgatgggctggggagagtgtgggttgggtggcccttatccacgcagggatgaggcctgacctcggagtcgagcggtacgatgacacgcttcgacatcctcggtctcatcagtgcccgtggcatctgatgtgtcgatgggtgggaggcgagaggaggagagagggtggaggaggtatggcacggcggcctggacgtcaacggcgcgggttagaccctgcgcgcgccgcgacatcctcgagcacaacaacagacacaccgccctcgagcttggccgtccgatgtgtcgggtgctgtcgaggtggtgatgactgaggtaggaggtggtgagctcgtcaggtttgtgttgagtgactgctgctcgggggaaggtgttggagcaggaaaaaagaaaagacagtcgcgcgctacggtgggagggaagggagggcgacgagggaaaagagggcacgtctggccgcggaggaagccctggctttatagtcctgagctgttccctgcggaaatggcaggcgattccggacacaggccgggcggccgaccatcacccctcgcacgagggccagccggcctccgtccgtcttgagtgcgatagcatgcagcctgagcctgatcagcaaccgtcagcgagcgcccactgagcaacagcgagcgccagtgggacagtaggaagggaggggagagggtcggttgagtgacgagaacggtgcctggccgccagcgcgccttccccacgccaagaagggtgccttgccgatcctcacccgacgcgtcgcctggggccaaacgtcgcgctagcgggcgggtggccgccgggcttgcttcttgccaaccgacacccttcttgacaggcgaagatgggaggggtttcccaatcgcccatccgcacctatctcgaaccacgcagactgaccactcatctgcatccatccactgcaatcagtctctcgccgtaccctggtgcgcatctgccgcaggcctctcgtacctccctcggctgtacgcccaccctggccgccagcgtttcgcaaactctaatccggcaacatgcccttcgcgctcgccatctggccggcagccgtcgtcgcttcagcacccgacctcttcgagcggactgttgagttcaaggctgacgtcgtcgtacgttgcgcgggcgtccactcgccgccatggctgacccccgccccggacccccctcttgccaacaggcgacccaccagaactttacctcgctcttccacaacaaacctgctgaagtcagtctagccgtcccttcccactggcggccgaccggcgctaatggcgattccgcacttgcttctgcttccgcagcttacgtctgctccatcggtcaacacaattactgtcggcaccgactcggcttcgatgtcgaccgtcaacatcggcgccgacatttctgccaaggcggacaaggacatcccgttcaagcgggccaacatattgcacgagctcatcaagaccgagggcacgctcgcctgctatttcgccgccgtcgttaccatcttcctcccggccgatgactcaaagtcggccgaatgccctcttacgaccgacgacgtcgctgccatcattcccaacatccaggcggtcgccagtgtctcgactgaaactgccgagcgctttgccgccgccgcaacgcccgaggtcatcgccgctgaggcagacattgtcggcgcagtcaacctcagcatggtgcgtcgaccctattgctttgccgtcgagagccgttcctaatcctcgcttgaagactcttctgcagcttcctcgcctgcacgaggcctacgagtcctacacgatcggtcagcaggccgcctttgcccaccacaacgctctctgcaagcgttcgtccaagaaggcggccgtcctcgccgctcgctgggaggcggtcaacgcacttccctcccctcgctcgctccccctgccggcctcgtcgatctactccatgcctgaccagcggcccacccggctaatggtcctgctcgacagcctcgtcaaggagaccccggcgacgcacgccgatcaggccgacctcgagcaggcggccgccgccgtccggcagatgtgccacggcatcgagaaggcgatggtcgagcacgagcagaccaccaaggacgcggccactgtcattgagcgccggggctaggccgtccgagccaaggtcgaggggctgaaggtcggcgggttgatcaatcgccagaggtaagtcgagtgacaaagagctacgccgggagagggggtttgactgaccttggcgttcccttcgacctgcagccgcccccgcgtccgcaagacggctttcgttaccgacgccaaagctgcccgctctagtgccagcaatgtggcctcgcccgttcccgagaccgttgagctgccggctttgcccttgccgtcgaacttctcgctcgaggacgcttttgagctcgacagcgggtccaacatcgacggtgtcgacgactcactgccggcactcactccccagatgacgagcgagtcgatgtcgtccggaacctcgatcgagacggcagccgatagtatcctcggcctctttgggctcggcccgatgatctttgacgctgggtcgagcgtcgagtcggtcgtcgaccaggcggcgcccgtcgtcttcagtgccttcgaggccggggtcgagcgtgctcgcaaggctcgggcactcgcactgacaggcggcctgcccggtcagacctcccggctgaagaccttggtgtgcgtcaagctccccatttttaggcccccccctcttcccgcctttctctgctctgctcacacccgctggctatcgccctccaccgcagccgctgagttagcccgctcaacccagcctgagccttgcccgatgttaagacggcctaccgcacctcctcaaaggcgcagttcattgctcaccctgcggcgctggccacgattgccaccatcaaatcttcgctcgaaggcaaggtctcgaccgggctggcggggcttcgcaaactcgagcgcaagtgcaccgccagcccttcgacggccaggcctatcgacgacgactgggtcctgctcggtgaagactttgctccggccggctgcaactcggctggcgcccgtcggcgtcgtgctcaagccgaacgtcccaccatgacgatatgacgcgcagactctgctagattggcgtcgatatgcagctgtccgtctcccaccatcctcttcatcctcctgttctcaagcccctctaacgcccgcccccgactacctcacaacgcatcggactcgcgtctatatatacgcttgatcttgctctttcccaacggactctgccgctgcccctactacaccaatgtacctaatcgcccttgtctttccctagggctcctcgtccgcttgcctatacttacttctggatgcgcctggacaaagagggcagagcgagagatcatggatcgagcccggcctccctcagtcgtcgcgtaccgtgctcgccggcccactggccaacgagttgaagacgctcagcccttgatgaatcgcgcacctcctcccagcccacgccgtccgctcgaggggaggcgtagagaacgacgtccttgacgaccgagggcggcagggccgagacaaccagcttgacgagggctggcggagagggtgctgccgacgaggccgtcaagggcgtcgtcgatgcgaccgttgcggccgccgccgaagctgccgacggcgaccatatggccgtcgcgagattgtgcagagccagggcgtagaggagcgggttgcgcgaggccgcaacgtccttgatgagagcgcggacatggccctggaggaccatcggatcgttctcgccgacctggccgagccactcagcccaaggccgctcgaggacaacgtcggccggggcgagggtgatgccgcgcagaagcggcaggttctcgtccgcccaaaagagccgtcggtagtcgaccgcgtaaggcatgccgaggccgagtggcggcaggagaagcgtcgcaaagagcgaatggccgaacgaggttgccgcataaagcgcgtggaggtccgaatagaggtaaaagaagggtgctggcggagctgggctgagtgcgagcgaggcgtgccacttttcgagatcggtctttgacggggggggacgggcactgacccgtagcgggtcgagcagggcgcgcatgagccgttccacgcacgagtcgcggtaaacctccgtcccttcggggtccctggcgacgccgccgacgacatcaggcgcaacgacattctgctcgagctggacaatcttgcagcactcgtacagtgcagccgtgccgtccatcgccttgccgtctgggcccaagacggcctgaccaataagcgcaaaaaggaacgttgcctggacgagctccgtctcagacgcgtcccagtcgggcgggcacattagaaaggcgcccgagctcgtcgagtgcaacagctcatcgagcggagcaaagacccagtcgaccgcgagcggcagaccgcagcgtgacttggggtaggccgcgggcgtcttcggatagaacgagaccgtctggcgcgaagggattcggagcgaggtgacgtccttgagggtcgccgaggcagggaagaacggcgcggcatgtgcctcgggcgcgggcgacgtcgcgaagcggtagaagggctcgagaatggcgagaccgaagcgatgagtaacagcgctggcaatgctggtcgcaaggcccgccgcctcgagcagacctggtaacggcgtcgagagcatgtcggccaccaaccgctgagcgagtggctcgtcgccgggcacgagcatcgacaaaagtgcgtgcgtcttggcgagccagtcctgccgctggggaagggcagcgtgaagggccgccaggagcgcattggttcgtcgccggtagacgtgcgaatcaggcgtcgcggccagcagagcgaggtagagcgagtcgagcagggcgaccaaggatggcgaccacgagaccggcgggaacagcttgatgccgacattgacgatggccagcaggagctgagcgagacgactgacgatcggccagctggtttgctttgggctagcgagcgcggcagtcagtcgcgagccgacgtccgagacaagcgattcgacggcctcctgcctgagaacggcgccaagccgagccttcgtgtccgatccttgaaccggctcgttgatcgccgagccctcgacccaagactgggtgaattcgagcagctgcgcaagcccgagctcgcgccctgcgacggcagccggcagtgcagcgagaaggtcctcgaaccagctcatgccgccgatctgtgaccaggtgatgtcatgctcggggctggtagagtgcgggttgatggcgcagactgtccagcgcgtgagaagacggtagtacgctggccgaagcggcgatggccgtgcggccgagtggatggaagctccgagcgctcgccagagattagccgcgtcggcgcacgacgacgaggcgaggccgtactcggcccaggcggcgaaaagatcaagcacgccccaagcgagcgtgtgctcgaccggcgttgaaggcgaagaggcgacgaagcggagaacggccccgccaacgccagaattgctctcccatacgagcttggcgacctcgcgcgaagatttgacaagggcgacgagcagtgccagggctgtcgggtcggggcgtgacgagaggagcgactttgcgagcgcgtgcaggagcggcgactggggcagcgggtcgagcagcgtcgccggcattggagagggcagcgcagctagggcgaggaggatcgccaggatctggtgcagcgtctttgacgtaaagcttggcgtcgaaagccggtcaacaaggagcggcacgacgttggccagccgggggatgatgtttgccgcgtccttcggatgcgaccggagaccgatgggcaacaggtgctcctcctcgccttccaggctagcgatggctctctcctcttcagacccgacgacgatctcccacaggagctcgattccactgcgagcgacctcgacgccctcgcggccgagaagcgctgcctcgccgaccggccaggcctgggcatgaatgccagaggcactctctgaaacggcagaaatgctacgcagccggcgggcgaggatctggagcatggccgagcgttggcgaggcgaggatgacatgcagaggtgaaggacctcgggcagcgggatgtcggccatgtcttcgtcaagggccgcagaactcaggacggggtctgcagcggaagatcaaagtcagcagcgaaagacggcgtgggcacctctgcagcattactgaccgtcctggaccaatcccggcaagtcagccggcgcctctgcctccgcctggacggccgtctgcgtgtctgcgtcgtcctcgactagtggcggcagctcgtcgtcgtcgtcatcctcgacctgcgcggtcggtcgaggctcgacttgctccaccctcgccgacgacgcacccggcacagacgaagctccgcgagtttctctccgcttccggaggacgtcgagtaggcctggcccgaagtgggcgagcagctcgtctcgctcctggacgacctcgtcgacggtcatcgccgccagccgcgcgtcgttctcagccgacacctcgcgctggatgcgtgcctcctcggtctcgcttgccggcgcaggaggagaaggagaagactcgaccggatccggcattgtcgtctggagggcgggcgcccgagctggcctaccgacggcaggcgagacgagacccttgcccttagaagcggcagctgctttggcaagggcgaagcgcgaagttgaccggtgggtcgcctgcgggaagcctcctgagctccctggccgggccgagggcaggctcggcgccgtcggggccgggacttccttctcgatgatcgagccgagcatgcgggagggagatgaagaatcgggaggcaggactgagtgacagtgcggggtcgacctgcctgcgctccgaattctcgcgagctgctctcctccaccttcgagggcctgccgcagcagcagaagctcatcgtcgaggatcagacgatacagctgtcagagcgctcagcttctagtcctgatcaatagcatgcggccatgtcagatcgcccgccgactgaagcgagacgatcaagcgagccggccagcccgcgcccacctcgtttctccgacccagcagctcgccggtacccatcggccagacggagttaggacagcataagtgcagaagaatgcaagatgtgggtgtaaggagggtcgtgataggtcgtgaaggtacattggctggaggatatgaaggagctggctggcacagggcctcatgcggcgatgttgaagctctctgcagaggcaggggaggggcggatcagctcctcgatcaccttcgagacggtgaagagaagtcgaacggggacgacgcacctccgcagccgcaggcatcgacgatgttcgggttgtgaaagacaaacttggagctgatggggcaagtcgagggtaggtgggtcagcccatcgctcgccgcggtccgaaggcgggccaacccggccgatgacagactgacctcagacggtcctcgacccaatccatctcgctcccaagcacgcccatcagcgcccggctatcgatgatgacccgaacaccgtcctgctcgaccacctcgtcgaaccggccgggcttgtcgacgtattcgaggtggtaggccatgccggcacagcccttggtccggaggccgatcttgagcagcgtcggcgaagaggaagaggacgagagcgaggcgagctgctcgacggcggaaggcgtctgtgagagccagaccagaggaggcgaggacaaggttgggtcagctagcatcgacgtagggaggatcgaggtgaattagggccgccagaggcgagtctgggccaatgagcaggcgggcgagcgaggacgacgtacgagcgtgagggccgccttcttcggccgcggtaccgctcgcctcggcttgacggcgtcgagcgcggcggccgagatgagcggctgagctgaggacgtcgagactgactcgagcgagaatggccggcgggtcgctggcggggcggtggagtaggcggcagaccggcttgagctggcgagccgggtggcgaccgccatgcgggccgatgacgacgacggcccagcagcagaggcgaccgagagaaagcgggcgaacgaggtctgggatggcagcagcatggagcgggacatcgtgatgggagaagaggatgaaggtcgagaggggtgggagaggagggttcggtggcggcgagcccacactctttcgcgcgcctgctgctgctgactctccgcgcgcgcatcgacgaataagagcgaagctcattgcgctcgacccagaaaaggactcgcccaagttgcaactcgacaggagaaggatcgtgatctgcacccctgatgcccctcagaccggcggtcttcgcgcgacggcgaaggcggcggaggggccgtctgcgaccagccgcgcacagggccgtcgtcccggcttttgccctttcagccagacgtgctccggtacgcgtcctcccgccgcctctcttcgcgccgaggcgaccgctcacgctcgtacggccgccggtgccggtcatcgacccgttcgttgttcggccgaggtgcaggcgaccgcgaccgcggccggccttcggcttcccggctcgagcgtcggtgtcgcgaccgattgccgccatcgtcacgcacacggtgccggtgttcggcctgcgaccgctcacggccatcgtgtcgaggctcttccctgctccggcctacccgctggcggtccgtgtgccggctgctcgtctcgcgtggcggcttctcgtcggccggcttcgatgacgccgagccttcgcgggcgagccgacgctcagccttgagctgctccttgatctctttcttgacgagcttttcggcgtgccgttcgctgtagaaggtcagacgaagttcagtgacagccggcggcgagcgggtggtcgcagaaactcacgccttgcgcgccgccttcagtaccttctcgtgctcctttgcgagccgctgaagctcccgctcctcgtccgtcagacgcaccgccggctcaaagccgctgattaaggtcaaagtcaaagcacgtcggtcagtacccgtcaagcttgtggatcgcctcgcaagcggaacgcacagagcaacggcgagcgcatcctcctcggcctccttgaccttgcgaatctcatcggcgcgagctcgggcagctgcatcggcagaggtctcctggtcgcgagcgtaccaatggatgtctgacaagggggtagcggacaagcgtcagcgcgttggcctcggtcgatagtggtgggcgaggccatcaaacgaacctttgttctaggagagtagcacccggtaaagcaagaggtgtgtcagcagagatctagtcctaggtgaagccgctgtcggcgcaccttctgccaacggcctggaagatgccgcgaagagggaggaggtgcgggtcagccgggaggagcctcgggatgcgggctgcggggatgagcgcgacggaccggcggcagccatgaccgagtgaccgaggtagtgctcgcggtccttgtcggtcttgacatcgtcccacttgaactcggctggacaccggtgaaatcgacggccattcaggagatgagcttgcggtcgaacgagagaagtggcgaggcgaggcgcgacgcaccggctcctccgcgcgtgccgcctcgaacggggccagagaacatcctcggtgtaggttggtcggtacggggttgctcttgctgctgctgtctctgctggaggatctgggtactgccgatgggctggcttgtgtcaagacgggcgaggcaaggtggtcgtcaggagtgacgccaggtcggcttcgactcggccggcactcctccgacgcccacgaccgacgacctgctctttgccctcctttcgcaatgtccttcaacgatttcgatcgcggcaagaagccggcaagcgaccggcgccagctcgtcgacaactggaagcgtaatgcccctcgcgtccaggccgaggtgtgagtgctgctcgtgaccgcgagttgccctcgactcgctcgcttgtccacttgtcctgacccggaggttcgccgttccatcatgtgtcagggcgaccgcacgtctactagacctggaggagacgggcgaagtcggtgacgaagagcgagggcagtaccagctccagcagcagcagcagcagcaggttcaatcgtgcgtcttcggttcggatccgtctgatgcccttcggggactcatggcctgacgcccgtctgacctggcttcagaacgatcccggcgcatgagctcgacttccaggaggcccagataaacgagcgcgagaccgaaattcgggagatcgagagcggcatccacgagctgaacgacatctttcgcgacctgggcgcactcgtcgtcgagcaaggaggcatggtcggtacgtcgggccatccatgccttcctgttgagttcgagaacgggttcagcagctgacgtcggcgtctcacgccttcagacaatatcgagagcaacatcacctcggtcggcgtccacacgtcgtcggcggccgaggagctgacgaccgcgcacgagtaccagcgcaaggccggccggcgcaagctgtggctgatgatcatgctcatcatcgttgtcgccgtcgtcttgcttgccgtgcgtcggacatgctctcgggtttcctcagtcgccgtgatggctgacgtcgctcttgtgctcttcatcagattctgtcatgatccgcgacactccggtcgtcggtcgcccgacgcccactcgtagcctctccttccaccccttcgattccggaacctcctccacccactgacgtcgcgccactcgcacgacccgcgcacacgatctctcgttgtaccgttctcgctcgccctcgttttgcccttgctctttgatgccccccttgtgacgtttcctcctgtcctcctgcgagcgacaccgcgacgctccctgcccccctacggaacgtattgaatcgtaaacggaatcatgaaacagccagaaagacggcggacgaccgccgtgcccgcctccacacacctcacccaacaccgtggtcgcgagcaccgctctatagctccatgcccatcgaggcaccctcggccggaacgagcgcgctcttgctcttgcggccagcagtgagccgggtgaccttctcgaggtgcttgcgctccttctcggcctcggtccgaacgcggaccttctcgcggatccgcagattcttctcggcgtccgacttggacgagagggcgagcgactgcggctggacgagcgagagcgacgaggcgaggatagccgtgtcggccgcccgtgcgagcgctgggttgccagccatgctgagcaaggaggcaatggagtccaggtcagccagagcccaggtcgagtgaaacagccggtagcgaccaccacgcgaaggcacgcaccggttcttccagaaggccttctcccgcttggcacgaatctcggacacacgccggattgccttgacggtcgtctggacaaggtcccggtcgtaccggacggggacgttgcgccgcttctggaactcgaacgtcgagtcctaaagatagtgcgaggaaggggcaaggggtcagccggttgacgaacgcaggcaggtcggtggtccgagctcccaagaagactgacgatcgtcatctccttgcccgatgccttccggaacgacttggtccagcggaccttccgcgggttacgcttcatcctgaggggagaggaagggtaggcgggagtggccagtcaggagcagacagctgagggcgagtgcgtcgagcggcaacgcacttgaagttcttgtggcatctgtggtatacgaggaggtgtcgccgttagcagtcgtccgccgcagagacaggccagcgcaaatccactcactttgatgtgcagaagaggaaggactggagcatgcggtcgagcggagagtcagcaagccgcgagcgaggagggagctgcacctgcccgagcgagggccgcactttcgagtcgttgcggacaaacatggtcccccgaccggggtagaccgagacggagcagaaggagcagggcgagacacgcataaccggagacgagagacgagcagagagactgttgagaagaaggggtcgaggtcgcggcgaagggaggggttgaggctgctgctctgcttgctggcgggctcgactcctcgacgcctctgcgcgcgggcggcccaggggcggcgcgcagccggccgattgaaatcctcacggccgccagcaactcgcatccgcactttggcacagcaagtcgaacttcatgcgatgcgaaagcaagaccggacgacgagacgacgagagatgctacagacggagagagttctcaggattgctcgagcacgtcgacctgcaaaagagatgttggtgtcagccgccgtgccaccaagactgaagaatcgcccaagccgactcacgtagcgcgaccggagattcttcttgcgcgccgcgcccgtcggggtcggtccacgcgtcggcggcccactcgcgagcagagcttcgagcgggtcgagcgtcttggcccggacgggcggtcctccagcgggggggggcgctccgggcgagccggccggcggcggcgtgtgcgactgcgaggcgagacccgacgacggtgccgggggcggtccgccggcaagccgaggaggtccaggggccgaagcgacacgcgagtgtggaggagctggagggccaccagcgccgagcatggacgggctgctaaggccagaggaggccgagggcgggccgcgcggtagaggaggcgcaccgggacctcctgccggcggtggccgcatcgagcgagagggcgacgacgtctgagcacgcggaggcggcggcggaggtgcagcaggggcagaagcgtcggcgccggcctgtcatgaggatgagtttcggtggtcagctcaaaaggctctgcagaaacacgtcggtcatcccgcgctcgcaccttcttgttgacccagcgcttaaggtccttgtcaaagtagaaggccgactcttcgcccaacttggcctttatcggcgcgccaggcgtgccgggcgtcgtaggcggcgtcgcctccttcttgccaccccagagcttgccgagccacgagctcgtcggcttggcctcttctttggcggcaggagcagctgcacaaggacgagagacgcgagcacgtcagccggctgcacagcaggacgcaccacgacgagacgcacgctttttcttctcttctttgggctcggccttaggcgtgtcgtcgacggcaggttcgggctcggcggcgtctgtctccggttccggcgcctcaggctctgggacaaactcgtgaggagtgtaacccccactcggcctgtagccggcaaagcttccggcgccagcgtcatcagaccaagccggggcaggtgctgcatagccggggtaatctccgcctgtgggagtcgccgtcgccgccgttgccgcgggcgtatacggcgtgtagtcatttgtgctgtagtcgtttgtgccggcatctgacgaccaggccgagacgggcgcgtagtgagagaagggtccgacttgctgcgaaggatccggagcagcgacgggcggggcactcgccgactcctcaccctcgccagcaacaaacttggtgatccggccttcgaaccaggagccgaggccgtcaagactcggcttggcgaccgtgcgcgagatccacgagcccgacttgtcgacggcaccagtgcccgagatgcgctccgacagctcgcggaggtgattgacaaaggtaagagtgtgcgagggggaggggatcttggtggcctttagcgaagccacgatcgcctcgcagtacctgccggtgggcgaatggcagcgtcagcacagctaaggaaaagaaggccaggcaggcaactgaccgctgtgccaggccggtctcgccgcgctcggccaggaaggtggcgtggacgagacgataggcctgcagagtcggtaggccgctgaagggctcttggcccttgacgagcggaacgagtgagagcgcgaactcgatgagctcggtcatgatgatggcgtcgaggagttgcgaagagcgcgccgacgaagaggctccgtagaggtggatccgaggcggggtcaggccgcccaaaggatcgagcggcggcgggtgactcgacaagaggaaactggcgcgggtagagcgatcagccatcgactgctgcgacagggcaacaatcgtgcgggaacactcaccaggcgtgtccggcgtgcagccagccagcgctgacgagcgagtcgccgagtgcgaggagagcctccttgtcaccgacaccacgattagcagacagcatggcggcagcctcgcgccactcatcgagccggtcggctggtggccggcgaacttggccagtcagctggtcggatagcgagccggcgcctggaatgagcgcaagcctgcgatcagtcactcttgatacagaccttggagcgatgcaaggaggcagggacccacctggtcccggagcgccgctcagcatctcgtacgtcagccggagtgcttgccggcccttgcccgacggcggcaacgcagagtttacgccgagctcggccgcggcaaacgccttgacgacgtcggcccacgtctgcttgtcgaggcagctcgagatgacgagggcgtggctccagagcttctcctcggtggcgaaacggacggcctccttcttctcgccccgcaggagaaggtacgacaagtggtcgagcccggcattggccgagtgagtgggcgccgcagccccatcgagcgagggtcgcgacgaatggaaaccagtcgtctgcgccggcggagaggtcgagtagagagaggagggcgcggtgcttgccgacgtcattccgagaggcgccgagtgcactgccagtgagcgactgggcgcggcagcgaggtcgggatgcaggaccaagcggacttcgtcctcaaccttggcactgcagagagccaagccgagaagatgagatatttcagtcatgcagccccaagcgccgttaaatactcgagacgagggcgtcactgacctgccagagagtcgcccctcgttctcgaccatgaccccgatcaggcgcaggaggacggccttgccctcttcttcgcggtagcgggtctcgtccgagccaatctgggtcttgagccagccgagggcgtgctcagtctcggccgcacgcgcctggatgtagccaaggacgacgcccttcttggcctttgcgccagccgcgcctttggcagacgacgggtcgaggaagagcggaccaggaaaggtctcggccgaggtagaggacgctgcgaatggaagagcaagtgggtcagaaatggagcagttgtggcgcgtgagacgaccgaggcgagcagcgcacaagcaggagagacaatttcggcgacgtccaagatccgaaccgtgctcgcatcgccctcgtcgcctcgagcgaggcctccgatcggcatgccgagcccagggtagacgatcaggagcttgccgccgaaaccaaagctgatgaccggcgcccgaggggacaccgatgacggcgagaagccagcctgcggcgcccgcaccggagcgaacgcttgaggtgggaggtgcaggagcgaggagccgggcggcggcatcgagggagcccttggcggcgggctatgcggcggcggcagcggaacggaaggtgccctcggtggcggcgttggcgcggacggcggcggggcgagaacggctggcggcgccttgtgcgttgagcgaggcggggctcggggtggccctggaggagggcgagccactgccggcggcggcggtggcgccggtgttggtgctacagccgtcgtcgacagagggagaggagccgcgccccaagggttcgctgtcgccgcgcgagggagaggaggcaggggtgagggcgaggcaggtgccaggggcgcgactgtgtaggggttgcgcgatacgaccggacgcaccggggccgacatcgctggcgttgtggcccaagggttggccgtcttgtacggattcgttgtcattgtccggccaatcggaggcggcgccggcggcgtgatcgagggcgtggccgagggaggcgaaggaggtgggggagcggcagaaggaccggtgatgccgaagtcgagctcgcctccgtcctcctccactccgaagaggtcggtcggcggtggcagcggcggcgacggaggcggagaaggcgcaagcgagggacgcgaaggagggggagaagcggcagagggaccggtgatgtcgaagtcgagctctcctccgtcgtcgagctcgccgaagaggtcggtcggcggcgagagcagagcgggcggcgaaggaagttggagcaaaggaggggcagcggcggggctcgagacgtcgagctcatgtccgtcgtcctctccgaagaggtcgtcgatggtggcagcaggcgcgtcgtccataggaggcggtgaggccggctctccttcggatgcgtcgggcccgagctccagctcgtcgtcctcaacctcatccttgaacaggtcggctgaggccggccgagcaggagccggaagagccagtgctgggggcggcggagctggcgctgcgtcgggcactggtggcccgagatcgaactcggcgttcgcgtcgtcgtcctccccgaagaggtcatccggcggcggcggtgcgagctcaggaaagagggtggcgggcacaggtccaggagagggaggggtagggatgtcctttggcgcgacgtagccgtcttcgatggcggcagcgtcgtccgacgccatgacttctggagagggagagggcaaggtgaaggtcgaggtcgagggggaggagatgggcgtccggtcagccgggttgggcgcgccgaggcgggcgggctctcttacaataggaagatttattgatattgactgaaggcaatgtcatcaattgccgtttaccgaacggttgagtcgtcaatcaggaggttgcgggttcgagtcctgccctggtctaactggatacagcgtccctcgtctcgagggccgggtggctcaatggcggagcgtctgactacgattactttttgcccttcacttccacaaaggctggcagaggggagcctcgtgcactgacagttcagagaacatcgtcgaccgattcgggggtaagtcgttcagaccgtcgacggattctgatgcaagctgttcagacgtgctgtgatgatctcagccgacgctgggcactagcggctctcgtctaaacagaccaaactcgtgcgttgggattgtaaccgggaaaaagctcaacaatcgtcagtggtaggtgaggcgcccgaacactatcgagacgtgcaattagcaaaaggaatccctaaccgggagtcgaacccgggcccttcgcgtgagaggcgaatatcatagccgttagacaattaaggagttgatgataacagtcaatcaaaaagttaatcaattcttgaacctatctacagtgctgttccagaggcgtttgaaatcgcgacacccctgctttcgctgtgtctgtaatctatctgctttcattctcgcggctttttgacccctcaacatagtcgctcttcatgaccgagcatcggaaagcgggtggaaaagcaaagaaggaaggcaagaagctttaaggccaccgctcgacgtcacaaccccgctaaccggaccgccgaccgccgcttttcaaagtttgattcgactgagccgagtgcgaccgccggatactggactcctgagagtgaattgcgccgaacctggcaaccaccttaagtggcaccggtcgtatcttaccaagtgctcgatcggattcttccgttgcgccgcgttcggatacacatgccttctcgactttgctttcgaagtcgaggtacaggaatctcagggcggagccaaccgagttcgtcgcacatgggtgctgacaatggggcgtcgcttatgcatccagaatcgctctctgcatgcgcagccgcacaaatggtcaacgacggctcggcgtggtatgtcatcgatggcagcgcgagcgcagcgcgcggctctttttagtactcagagaccacaagctttggaaaggtacgtccgcgacggaggtcggcatccagaatgtcgtcgtcgccgagtttgacggtgcccggatcgaaatatcttcctcggcctaccgttgcaacaagtcgacgcaggatctggagcgtgccttaacgctccttgcacccctgtaggcagatacggtacccggcggcacctttgctcggccgattgctccagcatctttggctcttcctgttgcctgcacatccgaccacgtcgccgccgcctccctcacgaatccgcctcgctcgctgtcacactcgaacgactcgctagagaggggtcggcgttcttttagaggcgcttcccgcgccgaaagccaatggacgagggcgccctcaattttatatcgagactcagcggctggtcgcacccggcgtgttctcagtcctggtcgccgatgcgattccgctggaggcttactccggcaagatacccgacgacggattttctggcgaaaacgtcaggcttggcttgcgtttaacgctactgtaagcacacgatcacatgtatggtcggtactcgggaccgaattagtcagctctcaggaataagcgcgtttggtccggcaaagccttacttatgtagggcaaccccaaaaagtttttagcgtcgtcgtctgagaatgactcatgcctttggttcttgactttgcgcaacactcgacatgatactgcttgcgtcagtccgctttgttctcgtgcaggctgcctcacctgaacgatctcgagttgtgtgcggcgcgccctaccacttcgtttgctcttcaactttccaccctcctcatagctgttgaaggtgttgctgcgccggcaccggctgggcgcagcgcgggaacctgggcgcgccgccagcgcctggcgaccgcccagcggccacccgggcgccacgccctggagtccgccggactctttcctcctctctcttttcgctccctcctcttagctagacgaccgctcgctccccctcctaaacctcagtcgttcacggagtttctggacgccggcgtacgcaaagcccttggcgacgcacgcggcgacgcagctcgccggcgtgaggctcgctccgaggtcaggcttcagcccgctcagcaggcgagaagggccgtcgacgaagcctgaggcggacagaggtaacagtcagcctcgcgaccgagagcgcccggcagacgactgtgggccaggagcaagagcgagggcaggggacgtacagccttgagcctgccaggtcgtgccgccggatacgatgtctccttgatgtcagtatagggccgttttcagtggtaagccaaggtgctgcttcggtatgaggaggcttcggcgaaccttcggcccttggctggatcgtgtgactagccctcgtttctggatggagcagcgccgtggtgagcgtcgctcgactcgagccggcgacgcgtcggtgagcagagacgcgtccgccatgatgcgcgtcggcgacgaccgaagcgggtgccccgaagaacgcggcggccagaaggcagagcgagaccgtggccggtagatgcatgagacgagagacagtgcctggaggttttgcacaggagtttgagggataccgaggtggaatccgggagcgagcagtcttcgatgcgccgattaggggaagcgagggcgggctggccgagctaagtcgcgaatggagggcgcgggcccggggtggcaagctgtgacaaaggagttccggggagagagaggaaggaggagaggaggcgtaagtagggagtaagagggagagaaagcggtggccgttgtgggtctctgagcgagagggacgcgtctctccgaacagcaagcacgcccagcaggactttctcttccccacggacgcgaaggacggtcgggccgcctgcgcgccccctccgaggcccgggccagattgccctgcagcgtggccaaagcatgggcccagcgtcgatcgccgtcggcactcggccgcggcggccgaaaccttcgaggccgcgcagtcggattcgagtcctgagccaccagcaaactctgcgcgtcgagagagcggtccattcgtcgtcagattgcaagcggctggtgttacagagcaaggggaccaagagggagaagggagaaaggcgtgtgtttgagccaggaagaataagggagagcgccgcggcagaggccggagcggggggagaccaaggcgggcggacaagcagcagaagtttgaatgagagtgagcagcagaggtcaaggtcgctgctgctactccataatgacatcctctcgccggctgtgcgaacgggtcccgccgctggcaaaaagggcgccaaagtggccgcggtcgtcaaagcctcggaacgcgccgtcggctccggcttggtcctggccccagccctcgatcccgccgccagagaggtagcgcgtctgccggccgcgaccgcgctcctcagtctcgtcctcctcgcccgagtcgcggcgcgaagctgtcgagggcgtgtcgggatcgagcatgccgctcgagccgggtcggggggcattggcgtcgtttgagggcgagcccgggttggccgaccacggaaagagatgcggagacgagatgccggacgtgccgttcgccgacggcgggtcgttatcgaggaaggagaccgagcctgtcgcgatgcggccaccttcgccgatggccatgctggtgtcggcagaggcatagccgtcgaacggcttgttttcctcggcgtcggcgagcatctcgtggaggctcgggaaggagccggtcgactcgtgcttcagcgccggcggcgcggtagtgagcgggggtcgagtgagggaagcgtacgacgtctgcgagggcgcgtagccgtttgacggcgaggccgacgcgtctgaggccgagacggacggctgcgagacggaagacggcggcgactggatctgcagagccgactggagcatcgtctcgaggtcggcgttccgtgcagcctgggcttggatgatctggtgcagatggctacaacacgccgcgagaagagggcgtcagttcacaagcacggacgtcaatcgcgagagagtgcgaggcacgcaccggatatactcgaccgacttcttgaggacgatgcccttgttgggcttgccatccggcccgatcgcgttcagcccaccgccgccgcccgtcttcttcttcgggccggccttcttgcccttgcccttgccggcgccggccttgccagccttggcctcgtcctcgacagagaccatcatcggctcgtcatcgtcgtcgatcgcatcgtctgcggtcgggacggtgctcgcgaacgagaggtcgacggtgagcgcgcagagatcggccgcaagctcttgggccgagtagggcaacgtccggactggatcgagcatgcacgtcggcagtagggtcgacagctccgagatcttttcgttgattgtgtcgcgccggcggcgctcgaccgcgttgtgagactctcgtcgccggcggcgcttttcggcgagggtgtcgctgaacgttgcgaggaacagaaagacggcatcagtggtcgggcaagcgaagaagactaagagagggcgactcactgttttgggtcgtcgacgcggttcatctcggccaggccctcatccccagagtcgccctctcgaacaagcggcagctcgcccttctcgcctggcgggctgtaaacccacggcgctgctgctgctgcgctgttctgctgctgcgtcgtcgaactgaaagctggcaggctgctgccacttccgctcgcgtggaagccgagcgcactgccgccagagccgccaccgccagcgcctgacggaatgatgatggacgctgcccggcgatgcggcgcggcgctgttgctgcggctggtgccgccattgccgttggcgttggcgatcgatgtcgacggtgcgcccatctggccttcggtcgcaggcgagaggatccggtcgacgtcggccgccgtgaatgaaccccgacggacggcagaccggctccggccgcctaggccagacgtcgcctcgcggtgatcacgaatcgacgatcgcgaccgcgaacgcaggctggacccgccgggcgcagtgctgccccctccgttgatgccgttcggaccgccgccgctggccccaggatggcaggacgagatggagacggatgtcgcggggcttgcgagcgattccgagtagctcaggccggggaacgggccgctcctgccccgctgctggcctcccattgtcgaggacgaaaagtcggacgacgacgtgacggccttgtacgagtcaaaaagcgagttcgacagagacgccgagtggagcgagccgtacgacgaagccggagggtgagcgtgcgtgagatgaggtgagttattggccgacgtacggccgccgaggttgacgttgggcgtgtgcagcggctgcgagttggatggcatcgtcaacgattgagggttgagcgaagcaaagggcgccggcaggtggtcgacggagtgctgtgggtacgagaaggctgagccgtggccgaccgagtggtcgaacgctagccggccggaaggaaatgacccgacgagcgacgacagggcgtcgtcaatctcggctgccgaagccgccgcgaatgaggccgctgggaaggacgcgaccgaagggtacggcagcgtgtacttgtgcaagtgcgcaaaggaggacgagctggatgatcggccgttgcctggccagccagaagtgcgaatcagggagtcagcgatctgggccgaatttcaggacggttgctcgggcgctcggcctcagtgctcccttgtcgcccagcatggccgcactggccctctgtataccgccagcgtcctgcatcctgtccttctcagactccacgtcgtcgagattgagctgggctgccgtcgcagcaacgcaaggttgcgacggaccgagtctggccgagaaaacccaccgccgcgcgcgcgccgcagccgacggcaacagcgcgccggccctgtagcgcgtatgccgggcgaaaggggggtacagggggaggagaatgcgaaagacaaaagctcaccctcgagcggccagtcatcctgcgcgagctgctggcggtgaccgtctccgtctgcgtcgaacgtgtggggggcggcgtagtcggcggcggcttgaactggggctgaccgaccgtcttgcctggagagcgtgcgcaacggcgggacctcgaagccctcctgcttaagcttagggaccgtcctgcaggtcggagacgatgagggagccgctggtcagcgtccttctgtgctcggctgccggctgcgagatggaccggtcgagaggggcagcgtgggacgcagagaggaggagggcggggagaggcttgggcccccccacacacagccagccgagccgaagagggcttcttggccctcgctgcccgcaggtaggacgtacgagtaaggtgacgagactggtgcgggcatgtacatcgacctgtgctgggacatggcactggatgctggagggagagtttgtgggtgacagggctgcagcgagcgaacgaacgagtcggagcgagagcgacgcaagcgggccggccgcgggccccgcctgctggcaaagggtgtctcgcccttgctttcggcgaggatcagtccaccacgaacaatcgacacgctcgagcgagcgagtagagacagagagaatgagcgagcgtcaggagagaatgatccaatctgactcctgatcattgcaacgactggggtgtcgctcaggcaagagtggtcctctcgcgggcgggcctcgctgggcaactgcgcgccgctctgctggctccgacccgaccaggcgatgtcgaccctctgaagattcgactgcctgctgggctggtagagtagcacagtgggcggctacaggcttgctgaaaagaatgaaatgctctagaaaaaatcacctcgctcggagggcgagatgggcgcctgcgccgatcgtcacttgcaggacgctctcgtcgcacctgccgcgcctccgtcgtccctgctggcagcccggcaactcgtcggtcgacagcctgcttgtcatggtgtcgacggcgcattgcctgcagaagggtcgcttgtcccccacgcaggcattcacggcagaccctcggactctcttactcctcacaacggtgggcggaccgagtcttctcgtatgcgtcagaggcccccgcaacgcccgctttggggcgcggccgcgttgctcccatctcgctcttcagcccagccttgcttccctttcgcccgacctccaacctccatcataccataccctcccctccctccttcttcgctccgaaaagttgcgcagatcagggacatgtctgccgctgttcccgtccgctccgtccacgacgcgctcctcttcgagtgcgcctgggaggtcgccaacaagggtccgcgtttcttgctcgctcgctgcttgccgccgacgctgaccccttctgctcggactgcctgcttgctctttctaccagttggaggcatctacaccgtcattaagaccaaggcgcccgtcacctgtgccgagtagtgcgtttttttatcactcacttccgggtccggtcgcgaaagagggcgcagatgctgacgtcgtgcctattgacctcggcccgtaccgccggcagtggcaagcgctacacgctcatcggcccgctctcgtacaaggtgcgtcctttgacccttccacagcctcttctccaggacgctgactagtcaccacctctccacagtctgcgcccgttcgtcctgcttgtcctgccccgagcgcctagcgctccagtgaggaaagttgcaagcatcgagctgactcggacctccgtctcgaccaacccttcttcgcttctcctgccgctctctcatctcctctacaaatctcgtttcggcccatgattgaatcacagatggaggtcgacagcgtcgagcccgagcccggatcgcccctcgagaagacgctgacggccatgcgcgagcgcggcgtcaagctcatctacggcaactggctcatcgagggcgcgccgcgcgtcatcctcttcgacaccggatccatgtaccaccggtccgttccttgccctgcgcttgctctctcgtgttgccgcgagctatccgctgacttgtgtgcccgtccggaccgtctgggcagcatggacgagtggaagaccgacctctggaacctcgccggcatcccgagcccggccaacgaccacgagacgaacgagacgattgtctttggctagtgcggcccttcctcccttgcgcccaaaggaaggaagctgacctgctccaccttatcgcgcgagcagcatggtcgcatggttcctcggcgaggtccgtcaacctggccgacccttcctgacgatgccgcacctgtcctgaccctcccccttctctgcctgccagtttgccgtccaccacacgcagtcggccatcatcgcccacttccacgagtggcaggccggtctcgccatcccgctatgccgcaagcgccacattgacgtgacgaccatcttcacgacgcacgcgaccctcctcggccgctacctctgtgccggctcggtcgatttctacaacaacctccaacactttgacgtcgaccaggaggccggcaagcgcggcatctaccaccggtccgtccagtccaggatttactgtcgagtggcaatgctgacgctgtgctcttacctggctgcagctactgcattgagcggagcgcgacgcactcggctgacgtctttacgaccgtctcgcacatcaccgcctacgaggccgagcacctgctcaagcgcaagcccgacggtgtcgtcccgaacggtctcaacgtcaccaagttctcggcgatgcacgagtttcaaaacatgcacgcgatctcgaaatcgaagatcaacgacttcatcaagggccacttctacggctcgtacgactttgacctcgacgacacgctctacctcttcaccgccggccggtacgagtaccgcaacaagggcgtcgacatgtttatcgagggcctcgcccggctcaaccacatgcttcaaaaggtcggctcaaagacgaccgtcgtcgccttcatcattatgccggccgcgacggcgtcgtacacgatcgaggcgctcaagggccaggccgtcaccaagcagctccaggacacggtcgacgaaatcaagcagcgcgtcggctcgcggctctttgagcacgccgcccgctactctggcgagcacggaaccgaggtcctttcggacgacaagctcctctccaagcaggacaaggtcctgctcaaacgccgtgtctttgcgctcaagcgcaattcgctcccgcccgtcgtcacgcacaacatggccgacgacgcaaccgacccggtactcaaccagattcggcgcgtccagctcttcaaccggccgcaggaccgcgtcaaggtcatcttccacccagagttcctaaactcaaacaacccgatcctcggcctcgactacgaagacttcgtccgcggctgccacctcggcgtcttcccgtcctactatgagccctggggctacacgccggccgagtgcaccgtgtacgtcgagctagcccgggccctttggcgccgctgctcgtgctgaatgtcttgcttctcctcggtctcgtgcagcatgggcatcccgtcgatcacaaccaatctttctggctttggctgcttcatggacgagctcatcgagaactcgcaggactacggcatctacattgtcgaccggcggatgaagtcggtcgacgagtcgtgccagcagcttgccgtacgtccctcgcgtcatggccggccgattggccggaggctctggtaggctgacactctctggcaattctgtgccacactgtaccttctccaggaccagatgttctcgttcgtcaccaagactcgccgccagcgcatcaaccagcgcaaccggaccgagcgcctctcggatctgcttgactggaagtcgctcgggcttgagtacgccaaggcccggcagctcgcgctccgtcgcgcctacccggacgtgagtcgtcggcgctggtcctctcgcttgccgtcttttttgctgacgagcccgctcgtcgtcccagtcgtttgacgacgatgagtttgacttctccggctcgaacaaggtcggccggccgctgagcgcgcctggctcgccccggttcacgagcggcatgatgacgcccggcggtgcgtctttgcgcttcccctttatgctgccgtgagcggcgtcgctgatcaaatccgctgtcgactatgaacagatctcggcacgctgaccgaggagatgcagttcctcgacacgtccgactacatgggcggcaagttttgggagtcgatgtcgaagaaggatgacccggacgagtcgtacccgttcccactcgtcctcaagcgcgaccgggcgagctcagtcgcgagcgcagcccagagcggccagacgacgccctcgggcggccggcggctgaccgagtcggacctcgcctcggctgacgaggcgctcggcacattcgaccgcaacaacaccgtcgccgccgccgaaaagaagtagagggcgcgggctctgcctgctccatccttcgaagtcctttgagttgctcgccttcctgcctcctctgctcgcagccctctgcctctctgccttttcgcgctccttcgctgtacagccctgccgcatcttgtaccaaaactctctttttcttcaccgacaaactggatgaatcgaacttctgccagtgttgcttgtgccggggcctatcctcggcgcttgaccgttattccgacaggccacgtgcttctttatatctcaacgccggcgccgacgcgcgggcgacgcgaccgaccctctgagcgagcgagcgaaagtagctaatgctcaccactgtcacccaacgagcctccctgcctgcccgcccaacatgagcagccgaacacaagacattccgccttcgagggcgctcttcgcactgtacgccttggcaagcagggcggccggctggtcgaacttacgacagccgagcaccctccctccgacccgactgacatgccttggtcctccggcgcctcaaccccgacagttcgggacagtcgctttttacatggtcgcgggcctagtcatggtgacggccaatgaatgggtgcgccagatccttttcgggtagcagctgagcgagtcatcaaactctgctcagctcgacgactgacgcccgggagccctccctcaggtcctcgtcaaaagcgcgatgcccatcttcttcctctttgcgcaattggtaattgctgtcgtcctcctcgggtcctcgcacctgttcggcgtgttcgtcgttccgaggttgggtcactccttcagccgacgctcgcggctgcgtgccttccccgctgcgcgagcgactcaaccctgaccctccgccgccctcaaccacagatttagcatgacgacggccaagagcctctggaagctcattgccctcaacgtgagtgccctgcgctaaaagagctgtaaacgtcaaccccagacgctgactccccccgccgttcgcaggtcaccggtctttgctgttcgtcggccgcgccttctttcaggcgtcgcaatcacggcttacttttgctcaccatcacaggcaacaactttacgctgcaatacgtcgacgcctccttttaccaggtgagacctgccctctgcgccgtgcggcgtgacgaacgtcgggctgacactccgactccttgccgcgtctggcaggttgcgcgcggactggttctgccgctcacggtcatcgtcagctttctcgccttccagcaactgccaggtcggatcgcgctcatcagcaccggcatcgtcaccgacgggttattcatcggcgtcctctttggcggcggtgcgacgacagtcagcaggtgcgcagctccttcctcccaaagcgtaccccagttctcgcccgacgctgacgtcgctagctcgcaacgtcttctcgatctgtccagtctgggcgttacctttggcgtcctcagctcgctcacgacggcctgtcatgccgtcgtcatcaaagactcgctcaaggttgtcgacggctcgaccatggcgctcgcttggtactcaaacctcctctcggccgtcgtcatgctgccgatctcactcatctgcgctgagggccccaagatcctgcgcacttggactagcgtcgaagttctgcgacgtttcctctggggcacggccgtgacggtgagtgcttcgccaaaagtagggttcgggcggcgctcgctgaccgcgctctgttgtgatcagggtgtctttggcttcctcatctgcctagccggctttttgagcatcaaagtcacaagcccggtcagcaccatggtcagctcggctgcccgaggcgtcatccagaccggaaacggcgtctccctctttggcgacgtcatcaaccggtacgcctcccctcattgaaaccgggttgaattggcggctggctgatcgcctcaaaagactctctcaatcctcaaagcggccgtggcctctccatttgcaccattattcttggttcttgtttgtacgtttacggcaagcatgtcgagagtccgcccccgacgtatcagccagttcagatggaggaaaggatcgaagagggacgaggagagcccggagacaaggccgactcatgagggcaacccgccccggcggcgctgtcaatcccttccatcctgtctgcccacgatcgtcacacattcccatcgcatctttcgtcgcgtctccgccgtctcttatagatctatcgaagctcgttgtttgtggctctctcgccgcaggtgtttacgtcaaacgctttggcagtcgccaggctgcacctcgcgtaagccaacttcatccattccagcccgagtatctcaacgagctatctcatagccgcccttgcgacccgttagcatcacgccctcgcgacccaccagcctgcggcgagcgcgctcaccacgccgctgatgaggttgatttgagagttggaaagaatgtcctgcaagggagggtgatggccagctgggcgccgactgcagtcagtctacccgaaagtcgaggaatgacgtgcaggagccgacgcacgtagccgctgatggcctttacttgtccgctcgcaaggtcggccgccgagggaggctccacaagcactttgccggtcgatgacgagaagtttgtccgttgcagagtagcgccgaggatagagtccagctgattttgagcgaaagcctcaagttagccaaggaggcacaaagaacgcggaagctggcggcgtacgcacgaggctccctcctaggccggctacggtgccgacggcaaccacctctcgcacccatggactggcagaagatcggcatgcagcgttctcaataaacagcgtcacgacacacgtcagtccggtaagaaggccgccgagcgcggagagggccaggccactgagcgacacagcgccgttggtgccgggagggacacggcggagcgaggtcacgagtctcggaggggccggctgcggccagccaatttgagagaaatcgtcagccttcaggaaagagtcggcggtgaacgagggcaggatgaccaacagaaaggatgccgagctcagagctgagaacgagaagcgaggagtctgcagaaccgtcagtgggctgccctctgctcgatttcagggtagacgcacgccagtgtgtcgccaaagcagcagccgtagtgtctgagcttgcaagtagattgttagtggcacggactggcgacacaaggtgtcaagaagggacacacccgacggccgcgtagatgagaactttggaaagcaagcccgcgccgtttgagcttgagatgacggcacaggtgcggctgaggtcgacctgctcgtacaagagcaccgtgagatcagatacagccctcgggactaacccgactggtgacggcgagcagaggagagggttagtgtaagacggacgcacggcgactcgacctccgacagcatcttggctgaagaggaagcgccaagccagagatgcgagcacggcgctgagcgtgttgcaagtgacttggaaggccgaccggttgccgctcgatccgtaatcgctcgcgctcgatttgtcgtgaccgtcctcgagcgtggccttgacagccgccttgtacttggtcgctggcaagggcaggcgcggaatgagacggagaacctgatggcgacgtgattcgacgaggtcgtcgaggtcttacctttagagccgacaagatagaagatctggcgaccggaagggtgcaaagggttagcggtcctttacgacagccgcgatctgaaagacgcgaccgacaatcatcatcacgccgaagacctgccgcagacgattcaccttgtcagctctacagaagccggtgctctagcccttgctgttcctggccctcaccttcagatcgttgcccatgctcgcgtagctgcatcgcccccaagcgtacggtcagcgcccaccgagcacggtcagctgggctcagacggactgtagccttgtagcggttctcacccggcgatgacagcaccgattgctgcgacaccacaaaaggtttcgtcagcgtcaggtcagcgaccggctggatagagcgagtggcagggcaggcaagtaccgctccgcgatggcgcgcagcagtcggcgctagcggcaggcttcatcgcaggggcagaggcgacgacgcaccgccagatgccgagagagagccctttcggtagccagatacggaaaggtagagcgagatggcgagcgagatggaatggagggcgaccattgtagcgcagggaggagggagtagctgttgagagatcgacagcaccgttcggactcggctgtcgttcgtcggccggcggagggcgtcggacggacgcacgacagggccacttgctcgccgacgtgccctccgtcgcaaactggcatggtggacctagtcatcccactgccacctgtgctgtctgcgtattgagaactaaagtgactgggcggagcagcgaggccaggcagagcgagcgcacccctgcgcctggctcagcaaaccgaccaacgcccgggtctgaagcgtaaaagtttcgcaggcgacactcgaagagcaggaggagggaaatctatcccaagcgggcggcaaaggtcgaatcgagcgcaacgcgaggaggcgcgtctgttgccaggcggttcacgacgggcggggcactagcaggcgaggaggagtcggccgcgagcgtgtctctgcccagcaccgctgccttctgtcccttacgcctggatagccactgccacaccctcacgtcgctccccaaagtcgcctcttgtgcctgccttttctcaaacatgctctgttgggccgtctcgcgaatgttgagcaaggatgagtcaaaccgaccttaatgaggtgaaatactttgacccagaccacccaaaagctggcccaacatttggtttccagggcagcctgcgcgcggccgctccgaagcccccctccgacctcggcagcctccgcctcttgcccctgcgtctgacgatcccttcaagcagaactgttggtcccacataccaccggttgcctcctagacgtcgtcgtgctgaccttgcaacctccgaacccccgctcagtcaaaatggctgtgagtacaggtctccagtcggtccagaaccgaggctctggcgcgcaggacggcacggcacgagctccagatccgcagactaggagcttggtggcctggctggcggatgtgctagtcctggagcaggaggatacggccgacctggcgcgtgtggcacgtacgccttgcgtaggcttggacggccgggggagcttcgtccagggcgaggggtgtcgctcgtggacgcctgagctggtcagagagcagcttggacgagctcgagccgcgacctgagcggacgccagctggtgcttgccgagccccagctcgctcgctcctcctggcggcccagctctgcacagctcctgtccggcaccccctgcgctgcgatcgccagcgggagctgctgcggccgctgccctcgaggtgtcccttgccatcccgctgtgccgcgccggccgccggcgttcggcctgctgccgaccagcgcttagcttgcctatcgcctcacggatgccctgctcagcgtcctgaccgaggccgcctcgtgccctgtgctctttcccgccagcctattgaggctccctccaacttcaagcgcttcgtccaggtcggccgggtcgtcctcgtcaacgagggcccgtcgaagggcaagctcgcagtcatcgtcgagatcattgaccacaagcgggtgcgtccggctcgctcctgtcctggatgaggaggaggaagcgcagcggggtcgacccgcacgccttgacgctcggtctgacgagattgctcgcttccgtttccctgccaggctctcatcgacggcccgtcgacctcggtcccccgccaggctttcacctacaagcacctcaccctgacgccgttcgttcttaagtcgctcccccgcgctgccggaccttcggccgtcaagaagcagttcgaggctgccgacgttgccgccaagtgggccgcctcggcttgggccaagaagattgctgccaagggccggcggcaggcgagcaccgacttcgagcgtgtgcgtcgttccttccgtgccagtgcctggggcactgcggacgttgacgctgaccgccgcttcctcctcttcctacttacagttcgagctcatggtcggaaagcaggtgaagcgggacgccatccgcaaggcgctcttcaaggagaagaaggctgcctcggcataaacgtgttgtttgatgtcgtttgcttcccgtcacctcacgccctcaccccctgctttggatcgcatgaagaggccaaagctctgcccgaaacaaatcgggccggttgcaggagaagtcggctgcgggaggatggcatctgggtgggtcgaggaaagacggcgacgagacgcgtcgctactgggccctcacgcaagactacgtgggcgtctgtgggttgctctacgaagcgctctgtgaagatggatcgacgcacggcattcatctcgctcatcgcccgccccgtctgccccatcccgcgtcggggttaccaccaccggcgctgctgctgcccctggcctcgcgacggtgcgcgacctcagacgcagcgacgacggccgccatccgaccccaaccttcgtgcgacagaggggcagcgctctccggagcggccggatcgacaagtgcgaggcgggatgggtggatggcgggcgcagccgggcctgaacgagcgctccctgagcttgttgcttggtcggacgttcgcggcgcatactgctgcgaaggcgagggcgaccgacgcgggcgcttgacaggccgctcatcgcgcagctgcgtgcgcagaagaagagttgagctgatcagcggacggcacccgactttaatctgctgtagaaagcagacgtactccagaagctcgttcttgtgacgagggcgcaggaggcggcaccagatgaggcggaagaccgcgctcgtcgctgggatgactgctcgtaggcctgcgctccggctcgcgcaggcagtcgggctcgacatcggcacgcgcactgcgtcgcgcctcgagcctcgcgtcaaggcgctgctgaccgagatgcgccgatactggggcggaaggcgcttgccgggcttgagcctcgcgctacggacggggaggagcgtcagtctgcagtatgaacagggcggcggaggaggcgctagtcgtaccctctgccgatcggtcaagtgttttgcctctgctgaccgtgcatcctcgaggcgacgttgcttgtcctcagcggcccgttgctcgtccgccaagcgccgctcctcggtgacacgctgctcgtcggcaaaacgcgccgcctcggcagtctcccgttcgacccgggccgactggccctgggcgctcttcgcgtcctcgacaggagtcccggcgccccacgcccgcatcttggtccctgcgacgtagttggcgtcctggccgtgatgcgaggctccagagccataagaggcgccgaggaaggacgggccgacggcggcagccgggcgaggccgtcctgagggccgggacggcggcgctgtcacctgcgctgccgcagggccaagaggtggcgggcgaccaactcgcggaggcggcgagggcgaacgccgacttgtcgatctcggcagcgggggccgtacaggtgaccgtccgtactcttggccatgcacgggcgaacgcgagcgctccgttcggcgccggacggcattgcgtccatcggatacagaggcgggcgggacggcctgtgccaactcgaaggtgcgccgggtgcgcagtgagttcggggaaggcgaacggcctcggtcccgctgctcgacgcgcggagccgaaggctgactaaggcggtcgtgcgaggttgctgctgtacaaggcgccaagagatggagacgggggcggatgagcttctgcgttggaccgaggaataactagcagtgatgtgcagccgcgagcggtcatcgaccagccgacctggcctggcgcggcccacaggcgggtggggcctcgcggatcagtcgaagatgactaccggcccatccaaccctcctcggggcgcgtgccgcgaccacggattgcctttgacgctgcgagatcgtcgggttgagcgtcggcagacggccggcaagccgaggccgcgagcgacgaatccggatgaagaaggccaggacaagggctggagcgtgacacgtacgagtcgccgtcggcgccgagaagcccggcccatcgtctgtacgaggctgagaccgcgcgggccacctgttgacgggagtaggctcgtcgaccggagcacgccgctcgtcgcgcgacgagtgcaaagctgcaggctgggcggcggcggctggcaacaggccaggaagcgcctggactgggcgggtaccgttacgagggaaggccgccatgccacttgacgttcgcaacagcggccggttgagagagctcttgtttaactcacgctcggcctccttctcgcgaccgatccgtctgagccgctcgcgctcagactctggctcgagcggctgcgaaggcgacggctccgtgagcagaggtgagaagcctggcgccgaaggagatagttctgacggcgcgttgggcgggccagcgagagaagaagagggttgggaagtagaggaaggccggcgttggagtctagggcctgtcggcgtcgcaatcactctgccttgcggcgcagcaggacggacggctggcgattcgtcaggagcagaccaggaagtctgcccggagcgttcgtcataccagtacttgatgccagtccccttctggtacctcgcctcccactcgggacggccgtcgtcgaccgcggtcgtccgggcggggacggccggggcgcgcgccttaagacctgctcgcgggccggtaggcaccggcggacggatagctacggatggtggtgaggcctgggcggccagaggtgctgaagcggtagacatcgcagcgcgacccggagagcccggctgggcagcggcggaggaggcggctgatgggccggacgggccaccagcggacgctgtagccgaggcgtcgacggatgcagtcggttggacatcagacgaggccgccgaaagaagcaggttgtgagctgtgcctcccggagcagcgttgagattgtatcaggacggcgtgcgggatgggccggacgagcgtgcagacgggcgcaccgcttgccgagggcttctcggacgtccgggccgttgcaccaggctctgatgcagctgacacggccaactctggctcacaagccgctttggacagagccgaggcatcactggacttgaccggggtcgctgccgaggtcgcaggcggggcaggttgtccggccggggcgggtgaggcgacaggaggctcgaccggcgcgagagcttcgcccagcagcgcttcgacctcaagagacgtcgagctcgttgctggaagggacaatactggagcgacagctgcttccgcctcaatctcctcctcggactcgtcgtagccccagtcgacggcttcctcgtcgtccatcggcgcagtgagctgagaagaggaaggcgcgcgggtcgcaagccagtgcaggctgcaccgtcagtcccccagcctcgggcagagaaagattcggatgctgagagaccgacctgcttcgagcagagagcgtggaatgtcggccttgacgagtgactaggcggcagaagaagaaggtctgaggggaagtcgttgttggaggaggcccagccgtcgccgccctccccctctgctcatagactccttccttcaggccttttgtattgccccccttcctcctgctctgcaagcttcacccacgcgttgtcctctctcccagctgtaacaactctccccctcctagaccttgcccttcctaagggccggataacatgacgactcgacagacgaagcggtggcggaaggtgttgcgactgctgcgctctcctcgagcgactagcagctcgccgtggtcgttttggtcctggaggtggaccggatgggctccgctgcgcagttctccaatccctcttgttctctgcccttttgttctctcccactctactcgagcgctcccaaaagcacttttcgagctgcactctttcttcccccatccgtcatcctccttctccttctggccctcgtcctgagaagtagcctctcgctcctccaggtcctggtccgacactcgacggatctcaacgattcgaggaagtcaggaagaatcaaggaagcgggctacaaagggggagaggtcaatgatcggtacagcggatcaagagagtcgaggagaggaaaaagagcgagggcggtggctactacgacgttgatgaccgcccgtcagagcttgttggcgacggtgaccggcttcgtaaactggtgctcggtcacgcccttgcccatcgcggccgtgctactgacgccgccggtgaccgtcatcagcaggctgtcgacaaactctgcgccggaccactgcgcgcacgagcacggaaggggagggggaggtcagccttagtcagttgcgcgcaaacagaaagggaaaggggccgaactgtctggtgtgtgaggacgtcgcagccaatgtcgcgctcgcggcgctgaatgagctcgacataggccttcatgccgtcggtcgcaaatgcggcggcgaacaagtccgagatgtaggcgttcgagtggaggccgccgagcgtgataaactgccagactgtgggcgggcgcgagagtcaaaggggtcagccagggagaaaggatgagcagtggcgccagacgacggaccgaagccgagcttgccgagctcccagacgtagtccttcatctcgcgctcgccgagcccagccgcgtcccagttgaacgagggcgaaaggttgtaggcgagccactggccagggacggccgcatgcacgccgtcggcaaactgcttggcctgcttgtagatcgggctcttagtctccatccagaggaggtcggcgtacggcgcaaaggcgatcgcacgatggatcgcacaggtcgtcccgccctggtagcctgcgagcgtcggcgggcaagtgggcgttaggaggaggctttaggcaagcgacagaagagggacgcacggtagtagccctcgcgcgtccggggcgcgtcccagcaccagtagggcgccgtcttgaggccgtacgactcggtggcaagcgcgagcgcagcctccttggacaaatgggtcgccttggacgtgaacctggagcaggacgatccgagtcagcgctgaagacaagaggcgaaatggatgagaaggacgaacgtctcaacatcggtggtagcgataccctctgccttgagagcccggccgagaacggtcgagtagagctgcaggttggcgtcgacgatccacctggtaggcgaatggcgagttagcagagggcgcacaatgtcagagcgagatggagactgacttgtcctcgacggcctggagggcggcgcccgacgtgccggtgcgctcggcctcattcatcatctgaacgagcggcttgaggcccttgctgcagaccgaacgaacacaaagggcagaggttagccaagaatgagaacaggaccgagaggagaggggaaggcggcctgacgtcgtcgagccgaggatgaaagcatggtcgcgctcgtcaatgttggtcgtcaggagtgtcgccgcctccgagtcggtccgggcgacgacgaggttctcgacgcccatcacgtcgtactggagccggatcgcgacgagcctgcgagcgcacacgcgagagacgtttgtcgattagcgctcaaacacagggggccaagtggatgatggaggagaagcgcaccggttgatgtgctcggcaatcgggacgagcaccttgcccgccatgtggccgcactttttggtccccggcgcctggtcctcgatgtgaatcccggccgcgcccgcctcgacaaagagcttggttagcttcatcgtcgccgtcaggccgccgtgcctgcgcggaaggacgaccaggctagcgtcagacggtgcagaagaggcggtgggaaagaggggcgagagaacgcacccggtgtcggcgtcggcgactatcggccgcatgtagtcgatcagcgggaccttggaccgctcagcctccgagagccggagccgggcgtggcgctgcttcctgtcagcagacagaaagtgagtgaggaggggtcagatccagaggaggaggcgcaaaaggggtaagaagaggcctcgaaaaggggaccgaccggtcgtggaagagctgggcctggaataggtgttcgaccttgttcggaaccgtgttgtacgggtagtctgttacagcagcgcatcaaaaggatgtcaggcgcaggccgctgatacaaacaggcggagggcaggacagaccggcgaggtcaggcccgggctcgttggtcgatgaggccgtgcttgaagactgccagccagagacgtagaccgtctcgaggtgcttggccatctgcgtcacttggaccgggtcgagcctgacgagtgggcgggaaagggagctgtcagatgcgcaagggggggggacagggagagcggcccggaaagggtttggctcggcgagcaagcgaggaagagggtaaaggggggcaacgcacgcgccgtaggtgtggctgacctcgccccgcttgaactttccctcgagattagcgtacttccagagccgcaagaaagaggcaagggaagccgaagtcagcgtcgacagagggtgcggggactgccggggcccggctggcacgacaggtgattgagagaggcgactgacgagcttcttgcccattgcgtcgctcgggtaggtgagctcgatggtcccgcgcaggaggcagacgtccttggcagagtagggtcgggctgtcttgctgaagcggggcgtctgcgatttgggaggcgggatgggatgggcgggagggaagggggcgcgcagcagaggcgagcgaggggagtcgaactgtcagctcagctgctgggacgtcgcctctcccgacgagtcgacgcgagaagaggcgagggagagggtaactgaccttccaccactgctcgacctgctggatctgggcgtcaaaatgagcctgctcggacgagctgttggcggtgaacggatggaggagcgtcatggcggaagcgaggcacgggagtgaaacttaaggtactgtggtgtgggtggtggtgcgagaggggtggctggcagcggtgaggagagtcaagaacgagctgtgtcgtcggtgcgatggtggttggaaggggggcagggcgagtcaagcacgagcgagaccggctacttgaagccttctcgggcgtctgcgcgcgcaggcaagcaggcaaccttcggggcgaaccggcagccggcaatcacgagccagcccgcccgcatctgccaccgctcgacgcccgacctggagccgatcggccgacgacccacagaattcgactctcggcctggcatcttgcagcatcgtgcctcgcaactccagcccctgcgcgcgcccgtcggggagagccggctctccccgtgcccgcctgcctgtgtctgcctgtcagcgcacagagaggtcgacgacccgacccgagagcgtcccaagcatccccgttcctgtcggagctagcctgctcgctccgagggcgccgtcagtcgtcccttcagtcatcgaggcagacgaaagcgatctcgggcgtcgccgcagcttccttctcccgcgcgcagctcgccacacgacgtgccgcacctcctacctcgtctgccccaaacccccccccttgccctccactcatctgtcaagttcttagcggacatcttgataggtgttgagacgatacagaaggggagaggaaggcggagagcttggcaagagagagcggctccgggctttgtttttgggatgattcaacgatgtagagtgggtgcaatgcgagggccttttaagagagaaaacaagcgagagagagagagagggagagaaaaaggaaggacgaccgtttgggaccatctagccgagaaccatcgtcaggagggccatgcggacaaacaggccgaggcgcatctgccggaagtaagctgcccggctgtcaaagtcgacctcggggtcgatctcgttgacgcgcgggagcgggtgcatgacgatcgtcgtcggcttggcgcgcgagaggacctcgttgttgatgacgaacatgtcctgcaagcgaggaaaggggagggggatgtcagagaggggtcaatgagagcgagcgcaaacagggggaggagacgcaccttgaccgactcgtactctgcctcggaactgaagcgctccttctgaacgcgggtgacgtagaggacgtccgaggaagcaatgacctcgtcgaggttgacgcactccttgacggcgatgccggccttgcgggccgcctgcgtcaccgcctcgggcatcgcgagcgccggaggcgagacaaagttgagcgtgacgttgtagagcgagaggacgcggacgagcgagtggacggtgcggccattcttgaggtcgccgactgcaagagtgaggaaggaaatcagagtcagtcagggttgttcccttggggtgcgaggggaagcagtcggacgcactcatcgtgatggtcatgccgttgaccgagccgagctcctcgcgcatcgtaaagacgtcgaggagcgactgggtcgggtgctcgccaatgccgtcgccggcgttgatgatgggcaccggcgagtactttgccgccgtcttggccgagccgacggccgggtgccggaggacgatggcgtcggtgtagcagccgagcgtgcggaccgtgtcggcgagcgactcacccttggtgacggacgacgtgtcggcattgacgacggtgacgtcgccgccgcagcgcttcatggcagcctcgaacgaggtcgaagtccgggtcgagggttcaaagaacatggtcgagatgacgcggccgcggagcgtgtcgaccgagccgtagcgctcgacctggttgcgcatttcagacgcgagcgaaaagatggcgtggaggtcctcgcgcgtgtactgcttaactgagaggacgtgcttccggtggaaggacgcgtgcggctggaggttggcgaatggccggtggacggccgtctcgcgcgaactgctcgcgcccgaggtgaacgagagcggctggaagggctcggccgacttgagcgtcggcgagcggagcgcggctgggcccgaggccgacggctgcatcggcgacgagaccaccgggcgcgagggccggcgggcgagcttgcgcgccgtccgcgaaggcgcggccgacgaaaggtcctgacccgaggccgagggcgagctgacgccgtcgatgaagacggccttgccgccgatgacaacccggtggacgacacccgagaccttcttgccggtcaggggcgaccagcagccgtcggcggccgagaacgacgtcgtccggttggtgtcgacgtcgacgaccgtcgagggctgctcggggaggtcaaagatggcccgcgggttgtcgtgcaggcggagagtgatgtcgtcgagcgtgagccggccgtccgagacggcgccgaggaggagcgggagcgtctcctcgataccggtgcagggcgagacctccttgtcgaggtcgagcgcgagctggtacgggatcgtgccgatcgaaaaggtgtcgatgacggccaggttggcccagagcgccttctggtcgtcggccgacggcaggcaggtcgagccggcaaactgctccttggtaaagaagagcgagtagacggcgacgtcgcacgtcacctggaggccgcgctcctttgagagggcaatgagctcaatgtcgtcgcgcgtcttaacgttggtgacatggacgttgcgaccgtggaggctcgtcaggaggaggatcgaggcgaggtcggtcgtctttgcgtcggtgacgatcggcttgtccgccggccaggcggcaaagtgggccgagacggcagcgaccttgttgacgctggaggcaaagctcgaggggacaaagagcgagcgcgcgcccgaggcgatcgcgtcgccgccgagcgcctcggcgttcgaggccgaggcggcgacgccaaagaagtagtcgcacgaggccttgccggcggcgttgcgctgggcgacggcgagcgcggccgcgctgtcaacctgggcgccgacgccctggggcaggatctggagcgaggtgaagcccgcgcgcgaggcggcctccgagacgacggcaaggtcgttcgagccggccttggcgacgccggggacaaacgtctggaccgagacgaggcctgggaagctgaacgtctggtgcgacgtcttgaagtcgacgctgttgatctcaagcgagggcttgcggacaatggcctcgagcaggagcttggcgcacttgacgttggtgacgagcgggacgttgcggtcgatcgccatccggcgcgacttgtagcccgacgagacgtacgtcgtcggccggcggaaccggttcttggacggcaggttgacgtagaggtcaatcatgttgttggcgaggtgctgctcgagtgagtattcggacttctgggcatcctgcgaaccgctctcgccgagatactcgaggtacttgaccgggataccgtgttcctgttgcagcaggggggaacaaagacgcgcgaggtgtcagcgggagcccagttagggaagccgagcagaaggaagagacagtgacagacctgcaaaaagtcggacgtgccagcggtcgcgtagatgaggaagccctggcgctggagcttctggatcgagggcaggatctccatcttctccttgtaggagccgagcgagaagaggacgctcttggtcggaagcttcatgccggtcgcgaggagcgacttgaggtaggcctcgtacttgtcgcggccgaagcaggcgacctcgccggtcgaggccatctcgacgccaaggatcgggtcggcgccggcgagccggctgaacgagaactgggggcacttgatgccgacgtagttcttggggagcttgacctcggggtaggcctcgactgcgatgccgagcataaccttggtcgccatctcgatcgcgttgacgtccgtcaccttggagacgaaaggcgtcgaccgggccgcgcgcaggttgcactcgatgaccttgatctcgttgtttttggccatgaactgaatgttgtaagggccagtgacgttgagtgcctcgccaatcttggcggtcgcgacctcgatccggcggaccgtctcggggtcgaggtcctggggcggaaggatgagggtcgcgtcgcccgagtggacgccggcgttctcgacgtgctccgagatgtagtgcatgaccatcttgccgtccttggcgacggcgtccatctcgatctccttggcctcctcgaggtacttggtgatgacgactgggtgctcgcgcgagacggccgtcgcctggttgaggtaggtggccaggtcgtcggccgagtagacgacgttcatcgccgcgcccgaaaggacgtacgacggccggacgaggaccgggtagccgaccttgtcgcagaagccctgggcctcggggaacgacgtcagctccttccactcgggctggtcgacgccaatcttgtcgagcatgcgcgaaaacttgtagcggttttcggccgtgtcgatcatctcgggcgaggtgccgaaaatcttgacgttctgccggtggagctggagcgcaatgttgttgggcgtctggccgcccatcgagagcatgacgccagacgagcgctccgtgtcatagatgtcgaggatcgtttcgagcgaaatgttctcaaagtagagcttgtcggcctcgtcatagtcggtcgagacggtctctgggttgtagttcaccatgatcgtcttgtagccgagcttgcggagcgtccggatcgccgtgacggcgcaccactgccaggcgggcgggggaggcaggagagaaagtcaacgcgagagactagcggccacgaggggcagaaaggacgcacgtcaaactcgaccgaggagccaatgcggtagacacctgaaccgaggaccatgatgccgcggtcctcgaacgagacgtcgtgctcggtcgcgttgtacgtcgtgtagaggtagttggtaaaggccgggaactcggccgcgaccgtgtcaatctgcttgacaaagggcgagatgctcgcgtcctggcgcagccggcggacggcgagctcgtttgaaccgaggaacttggcaacctgccggtccgagtagccgagctgcttgcactggcggaggagctcggtcgggacgctcgagaggttgaaggtgctgcgagagaagggagcgagtcagctggcgtcctcggctcgagcgaccgtgcgatgaggagacgcacgaggcaaacttctccatcttgctgagccgctcgaggcgggtcaggaaccagcggtcgatgttggacatctcgtggatcttgtcgacgctgtagccgcgctcaaaggcggtggcgatcgcaaacagccgcttgtcggacggccggcagatctcctcgtcaatgtcctcgacgtagtcgttctggcgggagcgggtgaaaggtcagcttttgagttgaggcttgacaggacatacgagcaaaagactgaccgtgctgaagcccgggaaagagtcgtcgatggcgcggatggccttctggattgtctcctcaaacgtccggccgatcgacatgacctcgccgactgacttcatcgacgagccgaggacagtcgagacgcgggcaaacttcttgaggtcccagcgggggatcttgacgacaatgtagtcgagcgagggctcaaagcaggccgaggtgagcttcgtgaccgagtttttgatctcgttcagcgggatgttgaggccgagcttggcggcaatgaaagcgagcgggtagccggtcgccttggacgcgagcgccgacgagcgcgagagccgggcgttgacctcgatgatgcagtactccttcgagtgggggttgagcgcgtactggatgttgcactcgccgacgacgccgaggtgccggatgaccttggtcgccgtgttgcggagcatgttgtagtcggcgtccgacagcgtctgcgagggcgcgacgacaatcgagtcgccggtgtggatgccgagcgggtcgaaattctccatgttgcagacggtgatgcagttgtcgcggcagtcgcggacaacctcgtactcgatctccttccagcccttcatcgacttttcgacgaggacctggggcgaggtcgcaaaggccttgttgcagagctcggcgagctcggcgtcgttcttggcgaaacccgagccgaggccgccgagcgcgaaagccgcgcggacgatgaccgggtagccaatctcgtgggcggcgacgatcgactcggcgaggttggtcgccgtcgccgagggcgcgcacttctcgccaatgtcctccatcgcgcgcgcaaagagctcgcggtcctcggtcgtgatgacggtgtcgatctgggtgccgaggaccttgcagccgaggccctcaaactcgtccttgagggcgatgccgaccgagagggccgtctgaccgccaaacgtcacgtagatgccgtcgggcttctcgtactggatgaccttgcggacaaactcgggcgtaacggggaggtagtagatcttgtcggcgaggcccttggacgtctggatcgtcgcaatgttggggttgatgagcaccgtgtagataccttcctccttgagcgccttgatcgcctgcgagccagagtagtcaaactcgccggcctggccgatcgagagaccaccggagccgaggacgaggaccttcttggcctcgaccttggggtgccgggccgcgttagccgcgagctcgccgccgggcatgacgacgggcacgagcttctgggcctcggcgcagtcgctcatcgtcttgatgaagacgtcaaacaggaactcggtgtccttggggccggggctcgattcggggtggaactggaccgagaagaagggctggccggcggcgcccatccagatgccctcgttcgagccgtcgtttgcgttgacaaagagctcggtccagtcgcccttcaatgtcgacttgtcgacctggtagccgtgattctgcgaggtgatgtagcaccggcccgaggcggtcgacgtgcagggcaggttcatgccgcggttgccgtacttcatcttgctcgttgacgcgcccgaggcgagcgcgagcagctggtggccgagacagatgccaaagatggggtactttgcgagctccatcgccttgcgaatgttggtgatcgtctcggcgacgaccgaggggtcgccggggccgttcgagaggaagaggccatcgaagggctcagtctcgcggttgataaagtcgtagtcctgaaaagtgcgcaggagggtcagcggggcttacggcagaagagagaccggcagctggcacacgagcgactcacccagggcaggaccttgacctcgataccgcgcttggtaaagcagcggatctggttgtacttcatgccaacgtcgagcgcgaggacgcgcatcggccggccctcacgcgggtggaccgacggggcaacgccgctgacgacctggggcgtgtaaaggatgggctcggcaaccgagaccttggcgacgaggttggtcgcgttggggtcggcaaacggcacgagcgcaaagccggtccgccagtcggcagcaggcgacaagggcgaggtcgagcgcgagcggccgtggtggtcctcgccggtgacggcggagaggagcttgtcgccgagcttggcgaggccagacgacggcttgacggcggggacggcggcctcggcggcggcgccaccctgggcgagcgacgagtcctttcgggcaaggacacggccgagcgtgacacccttctcccgaaggcgcttcgtgagcgcacgggtgtcgacgccccagatcgcgggaacgttctcgtccttgagccactggccaagcgacgtcttggcgaggtggtgcgaaaagttggggttgtacgagccgacaatgagggcggcgacgtggatccgcgacgactcaaactcggacgggagcgtgcccggattgacattggcgggcgagagcgaggccgggcgctcggggacaccgtacgagcctatgatcgggtacgtcaggatgagaatctgggacgagtaggacgggtccgtgagcgactcggggtagccgaccatacctgcgagagggagagggtgttcagtcgcctgcgtcttgaaacccgtcgccagctatcgacgtcgcctcggcctcaccggtctggaagacacactcgccgccgaccgagcggttggcgccgaagcccatgccttcaaaggcagtgccgtccgagagctcgaggaccatgtcgccgacctcctcggagccgtcggcgtcgacgagcttgccgtcgacctcggtcggcgtaaggccgcggccggtcgcgagcgggtaatattcgccgccctgggcggtcgcagctgaggtcgaggccgtcaggctggtgaggccggccgaggcccccgagagaccgagctgttggccgctcggcgaacgggggtaccgggggtgaacggcggccgacgtcgggtcctggtcgaccgtgacgtcaatgtcgagcgagtcgcggtcgtcgtcatcgttcgtgtagtcggcgacgggctcgacggccgactgggcagcgaccgccggagcgagcgagaccgggccgtcagagacgggagggacgggcatcgtggacgagggcatgctggttgagggcagcctgacgaagggagggttttttggcggcggttaagttgacagcgtgacgaaacggggtcggccgaaaggcgtccgagagaaaggtgaggggatgtctaaggtaggaagggcgtccttgatgtccggatccgggtccaagctcgagagcgagggctgtcaggcaagccagggacgggagggcagatcgagaggtcagcgggctggtcgccttcgtcgagtcgcatgttcgaaaaaaggtcgtcggcccggcgtccctcctccgtcgtccccgtcatcctctcctcccgtttgtcggtcgcgagcacaggcagagctggctactgacttgggagctgggcaatgagaaggggtcactcttggggtgagctcgtttacaaggggagaaggaagaggttcgggtgaaacgagcgacgagcagcggagagggagcaggcccggagcgaaaatgggcggggaaagtgcagatgcaagtcgaataggcgggaacccaacgcagctgcgccgccagccagccgacagcaggaccatcgatctcgaccacttgctctcgctcggccgcctgcgtcgatactgccctcttacaacacctggacacccgcgaagaaagtcagacttgacagctcgctcagaccgtttaacgtctcactcaaaacgtttagcttctcgctcaaaacgcctccggcagcgccacttcaagagcacctatcctcggccgattcgcacctccccggcggctcaagactccgacggcctcttagccctgcctcgaccctcggccctctaagcatcgctacactcagtgccttcgacctcttcgcctcgcgctctagcccgccatggttcacacctccaagatgaagatctatgcgctgccgttagcccggctcgggcccaaggggacgaagccgctcgttgtacgtcattccctgccgacgagacctgccgaggctgcaacacgacggccacagcccgtcttcgtcggcggcctctgcagacaccctcgtatcggctcgacgtatcaggcactaggctgacccgactcgccttggcttcgctgccgcaccagtacttccattcatacctcccaccgcctgcaaaggcctcgacctcgtcgacctctggcccgcccaaacacccgctccgccagaagatcgaagaccggctcggtctcctgccaaatgcgccgctcccgctgcagatcacgaccaaggcttcgtcgatgtggaccgagctcgggcacgccaagccgacgagctggaaggctcgcgcgcaccggctcggcgagaagctgatggaccggatcgagtgcgaggagtgggcgctgaagggcgtagagcggggtctggtgccgccgggcttggttcaggttgtggtcgacgagcaggacgcgagcgggaaggagcgcgtcgaagaggcaaagacgctgcaggacgacgggatcaaggatcgcgaggaggtcgtgcgtctcttcggttctctcgtcgaacgaggcgttgcagcggccagccctgacactaccccgtcgacccgtggtttaacaggtccagctattctacccaccgaaagccgacttcgatcccctcccgacgttccagtccttcctcgaagctcgtgcgtccttccgaacgctgcctactgattcctcggcgtccttgctgaccgcccgccttctccttcgacctaccaggtgagccactccacgccaagcggatgaagcagtcgatctttgcgatgccggtcgcctctcttttcggcatcatcccgatcatcccaaacgtgtgttcaccagacctccccctttgctgcgcttgtgttgtggctgaacctgccccattatgcagttccccttcatgtacgtcgcctggcggacctggtcgcactggaaggcccgcaatgccgcctcgctcctccgcgagctcctcgcggccgaccggctcgtccccgagaagttgaatctgatggacgggctcctgccgccggcaaggatcgtcgatgacggcacggccgggcggctgctcgtcagtcggaaggggatcgagaagctcgttcaggacgaggggctgccggaggctagtctggaagaggtgcgtttgccctgcctcgtcggccccgtttgagattcgtgcgctgacgttgcgaatcacacgttcgcagcttatgcgcgccttcatgcaggccgaagagcgccttgccgccctcccgccctccggcagcgaagtgcccaagtcttcctgagcgtccctcgttcccgatcctgcggcccgcctcacttgtagaagacgcgttgttcgagcggcccgtcgcctgtagactcttgctagacccgcccgcctcgcaccgcttgccctcctctagagcttctccatctcggattgacgacctctcttctttttgctctaccgaggcaggtcaggctacaggaggtcatacgagagaggccgagacgagatctaaggggaggggtctatgccgacaaggtctgcgaggcgacaaaggcgtcgatatagtcgacgagcgcctggacagacgactgctggacagcgttgtagatggaggcgcggatgcctccgatagagctgagggcgcgaacgagtgaagagatgttagctgtgattgcacgcagcgaaggaggcggacagcgcgacacaccggtggcccttgagctgccgaagcctggcctcctcggcgcccttgaggaaggccttctcgccggtctcgccgctcttgatcttccagacgacgttcatccagctcctcgcctcgggccggacattcagctcgaggacgccggcgtcccgcccccgctcgagcgcgccgtagagcagctcggccttggccttgttcgtctgctcaatttgcgcgagtccgccctgggcgagcaggagccggacgacgagcgcagtaatgtagatcgggaagaccggcggcgtgttgtaaagcgactcgctgtcggcgagtgtcttgtagctcagcatctcgggaatcgggatcggcgtcttgtccgagtcggcgctgacgagcagccgctcgtggacgatgacgacgacgagacccgaaggcgagaggttcttctgcgcgccggcatagatcaggtcgtacttttcaatgttggggatcggccgcgagaggaacgacgacgagtagtcggcaacgagcggcgtgccctcaggcacgaggtcgaacgggaaggcgtcggccgcgctcggctcggccgggaattgaacgccgttgatcgtctcgttctcgcagtagtagacaaaggcggcctcgcccttggccgaaaacttgtactcgtcccgggccggcaggcgggtgaagccctcgggcttggtcgtcgcgacgatgttgacctcggcatgcttgccggggtgggcgagacgggccgcctcctgctgggccttgtgcgaccaagtgccggtgacgacatagtccatattgggcggcgtcgtcgactcggtccgctgggcgtaggcactcaggaggttgaggacgacggcagagaactgggtcgtgccgccgccctgggtgaagaggatgcggtgcgtcgccggcacgccgagcagcgtccggatgccggctgtcggtcacagagaaatcgctttggtcagctcaagcgtactaggtgaccagcttgcctccctcgcttggctggccacaggagtctagcgacgagagagcccaacggccagagttggacgcaccctcagcctcggtcaagacggccgcaaagtccttgccgcggtgactgtgctcgcagatgccgatgccggttccgttgaagtcgagcagagcgccagcggcctcctgacgtgcagcaatggagcacggcgagcgagcgacttgcaggcgttagcgagctggacggtcggagagagcggcaggcaggcggccaggcggcttcgccatgacgaacggcgggggacggacctcaaggacggacgtcggcagcgggctcgggccggcagcaaagttgtgggtctgagagcggaggtcggccatggtaggaagatcaggagggggtggtggagaaggaggcgaaagcagcagctcgtagtgcttggcctgactcgccgccggcgagggcgcagagcacgtcacgacgagacgaaacgcccggtgccaacgctagtcggtctcctggcctccgaccatcgccatagcaggacagacagcggcggtagtagctgctgcttcagtaggtaggctgtactcttgactttcggcaggccgggcaaccctgaaggctcgagctgcacctcagcccgactggctctgctgccggcgcggaaagggggcgacgagctgcgcgcccttcaacccttcgctcctcaccatcatctccgcttggacgcagtctcgatcaggacgacggacaaggacgaggaacaatgttggtctcctcctcccgtgacgctccgtccgtcctgcctgcctacaaatctaccggatcgagtaaaggcaagggcaagcgcctctggcgacgcgtcgtcctcatgtgagcccaagacacaaccgagctctgctgctcccagcactgacctagatcccggcctcgtagcccgctgatggacgagctcccggtcgagctgctccagctcgtgatccgtttcaaggccgacgcgatcctcgaccttgcggccggcgacgagctcgccctccagctccggtcgcccggccagacttcctctggtggaaccagactgtcgtctcaaaggctcgcctcaagtgctgatggctgatcctcattcggtctgctttcatgcagcgctgcacgctagtcagtaagcgctggcaggccgctgctgagcctctgctctacgcggacatctgcctgcatcaactcgcgccactgcatgtccaccggttcgcgcccgccctgaccgagcgaggccgctacaatgggcctcctcctagcctttgcgacgaattcggcccggagggacctcgtccaatcgatcgacgcgcctggcctgggcctcattgccgtcttcttcaaggcctggcgcactttccaaacctgcgctcgcttgggaccgtctcatgaccgatgttgcacgacgccaagtgcgacctcgtgctcgcgaccgaggacgactggaactttatgaaccactgccttgacaaggaccaggcccggacgctggccagcatcggtacgtcgcgagcggcccctgactgggaggcggcgacgctgactctttccggcatgacgtcgtccgaccctgtcggcagatcggacccagtacctcgccgagtatcagcagttcgggaccttccctaccccctcagtcccttcaatctcggcgcgcccaagcgaaggccagccgtcggcgccaaagcctcctctgcatgcgctctcgatggccgtctcggccctcgcgaccgacgcgcacaacgctgccccaacgctcgacgagtggttcgacctctcgccgctccgctcgctatcgatcgacggcaaggtggacctggccatcgtcccgcgggcgatcctccgcgcgggcatgacgggcctgcgcgagctccggctcgagggctggtcagtcaatacttgcccagccgaggcgctcgtcgtcgtcctgcgagcagtcgggcatagccttcggacgctgcacctgacgccgctcgagacggcagccttcccggtcgaggtcctgacggaggttccgcaattgaggacactctcgctgcacgcggtctcgggcgagaactgttcgtcctgccgccccatttgtgaagctcttccagcactgactgactcttcaccctctcgcccgttcgccagtcactgagttcctcgccgtcgggagcgactcgctccggaccatctcgcccggcacgcgccgctcgatcccctcacccgatcccggcccgccctccgccctcccctcgcgcctcatcgcctcccttctcgcctccgcacccgtcctcccctcgctcaagatggtcggcttttacgccctcgactttgcgggccagtatgtgcgctcggcgggcgagacggtcgagctcaacttcgcggcggccgaggcgggctggacggtcgttgatcggcatggggacgactggcaggcagcaagggcgtcggacgcgggcgacgagtgggggtcggccggcgagggggcggccgagtgagcgccggcgatggaattgccggtaggcggtgagcgaatgtcgaacatgcatctcctctctccgactcctcctttgacgtcgtcagccaataagctcgtcagcgaccagccctggagggcaccacgaaagaagccgccagtcgtcagcgggtgggtgcccgagcagcagtgacgagaagaaggagcagagcacacgaggggcggacggcatggtttcctgtggcatataacatgacgataaacttttccggcttgccgtggtaactcgaagcttggccgtcgaatttataggattgatcttgatcttgtccttgtcggtcggtcggccggccatctggttggcggtcttgtgaggatccaattatccaggtaaacgtgcgtcggcaggatgtgctggacctagggtggacttcttgtggccgcaagcggtgactgagtctctggtacgtcgacgccgtcccaccccttgagcgctacgaagcagtcaccatcaacgcgcccgaagacgctccggtcgctcgcaggccgggggcttgggctcagggacgggagcctcttgggcccgctcttttgagccgcagccgctcttgaaacccgcaccgactagaccctaagggccgtctatggtgacacaggggcaggttggacgaagcgtcatggaggatggggaggagagagggtcgatgctcgcgagaggccggaccgccactctcgccccgacaaaggggggctcgagcggggtcgggtcggtgggcgagcagacgcggcctttggactgttcgtggtggtctgagcgagcagagggcggcgtgtgtcacgtggcgaagaggtagagaggacgagcagctgaggacgtacggtgcctcgggctcgctcgtggtgggtggcgggcaggaggcaagaggaggatagggcggccggctcaagccccgtcgcgtcgagtggctgctgcgcggatgcacgagctggacaggtcggccccaccgtgcctgtcagtcgacgtcgacctcctcctccttctcctcgacacactcctcttcactactgctgcatcatgtcagaccctagctcgataagcctccggaccatccccgtcggcggccttaacgtcgacgtctatggcctcgacgagcttgcagcctcgccgggtgtcgccgtctccatcctcgtccgccctctctcacccctccctccctcgccgtcggtcactgacgatagaccttgtgctcctctctcgactctagtttgccctccacggtcggctgtctgaaaaggcggcgatggacggcttctgtcggacagcctgggccgagtcgtcgcgcacggccggcgccgagcgcgagctgctcgtcatcaacctcgagcagcgcaaccacggcacgcgagaaatcgtcccgccccccttgcgcctgcatgcgattgcctcgatctcattctgacctggtctttcgtctgctcgctcaggcgccgcatcagaaccagggcttcaagtcgagagcggacgtcgccggtaacccggcgcacttgtccgtcgcctcccctccttccctcaaggtctcggcatgctgaccctcctccccttttgctcgactcaaaacagcgtcgacatgtacgccatctacacgggctcggcgcaggacgtttcgttcctgattgacctgctgccggccgtcttgtttccggagggcgagcacgaggttgcgcagtggcttgccgccggcgtctcgctcggcggacacgccgtctgggcccttcttgcgtccggtgcgtctgtcgtctcgagcatatcgctccttcgtagtggcacgcagcgtctagctgactagcggccttcctctcgttcctctcattcgctcgcgcgcagagccgcgcatctcggtcggcattcccatcatcggctgcccagactacctctcgctgatgcgcgagcgcatggccaagatccccatcgccttcggtccgcccgccgtcccctgctcgctcctctcgctcatcacctcgcgcgcaccaccgtcgaccgctttcacctcgcccgacgcgggagcgaatcccttcatcggcagaaagatcctcgtcctctcgggcaggcacgaccggctcgtcccgcacgagcctcatacgcgggcgtttctcgacgcgctcgagctcggaccggagggcgtcaaggagcatcaggcgtacgagtgcgggcacgagctgacggaggaaatggtcgagcgtgcggcgcgctttgtcgcgcgtcatggcctcgggacggaacgccgagcggcgctctgatgagcatgccaatcagcaaacgagacctgtcggtccgcgcagtcagcgaggttcgagacggcttctcgtttctcggctgacgataagctatgagagttgcaccccaccccacgataagcgcaggcaacagagacgagagtcatgatgtcatcgagaaggcgggccgggagtctattggacgagaccttgagtggaggataatggcatagcgggcggggtgagggcgttcagatcgtgaagagaaagtatggacgttggagagagagggagaataagaaggaggtgcgaggtacagagagcatagcgagaaaggagggaggaattcaacaagggtgcgagagctgcgccagacctgcttacacgagagtcgtcagcttcgtcgaacgcgcagacgagcacaaagggacagaggacggaccggcaatggcgtcggccggcgccgcgcggagcttgaagcacagctggaacggggccgtctcggcgggcacggtgccaaacttggcggcgagcgtcttgaagaggcagatctcgcggatgctgtcgaaacgaggcgggtcagcttctgccagcacagggaaggagagtgacgagacgactcacatgcgagcgtgctgcgtggccttgtcgacgttgatgagcgggccgccagacgacaaactagcagggagcgtcggcaagtggtcgcgctcagcctcggtgatgcgcggcgcaacaaagtctgggtaaatgtcgagctggcggaggtcgtgcaggtaagtgcctgtcagagaggacgagtcagtattgttcgcaggcttccatctagcaaaagctgcgacgcacccataaacggcaagaaggcgtcctcgcgcgtcgctccggtcaacgacttggcagccgtcgtgtctgccggcgcaggcgaagcaccggtcgagacggcagccgagccgagcaagacgtcctcaaaaagccggccggcgtgcttgtcgaggatgctggcgtgggccttgcggatgttaacccagctaccgctggccgaggtgatgagctgcaggtctttaaagacgcgccgctcccagagcgacagccggggccaggccttgagcgcctccatgagcccgtcgacggcgggcgtttggaggccatgcataatggcaacgcaggatctgaggcggcgagaaggctaagagtcagcggctgttgtactttcaaggattctcggctaagacgcactgcaggttcgaaagctgaaagagcgcggctgccagcttgatgaagcgttcgacgaggacgacgagcgatgatcggccagcgcgagcagcgaggatctgcggatcatcgaacagagagcaaagcgtcagcctgcagcgttgcgacggcggtgactcgaagaggcccgagaccgcggcacgtacgagctccgtctcgacccaacgaacgacgagttcgaagcgccgggcgatcatgctgacgtcgctcggccggccgctgcgctcgaccttccagcgggccttctcgcgccagaggtcctcccagctgtcaagtgcgggcagtggactggcgacccacggcaccggcttgcgggcgagctcctcgaaaccgactgcgttgagcagctgtgcgtcgatgatggagaactggaccgcaaggacagtcgtcttgaacgagaggctgctcggcgaggaaagcattgggaaaggttagtcttgacgcacgcctcgacgaaggccgagcggtacgcacatgaatgactggtggcggagcattggctgcggaaacagggcgcgcgacatggctgcacctgccgcctgcgcggcgtttgtgacgggcgaggtcgagcccggcctgttgcgccgggtgaagctgaggcgtctgccggctttgagcggcgaggtggcggccgcagggctggaggcaagaggcttgtgcggcgaatctggacccggctgagcgagggatgcgagcgactcctgcgtgctcgagcgcttgcggccaaagatgaaggacgacgggcctgaagaggagggcgaaaacgccggccgatagggcgctggtgcgctgacgcgtcgactcgttgagttggtgcttgaaggtacagtgtcgggagcggccgggtccgactcggcctcgatcagagaaggcgaccgcgacgagaatgtagaaagaggcgggccaagcgccggcgctggagcgacgtggatcgtcgagccgggctcaattaggtcaaagtcggccgaagtggcgcggcgatggactggcagcggctcgtggcggcgccaggcgtcccggttggcggcgacgagttgttcgatccgagcctctcgcgcgcgccgcttctcgacgtcgtagtcaccgttgagccgccggagggcagcctcgacaccgccatcttcagaggtcatcgatgcggcgtccgactcgagcgcctcgagatcaaagcgcgcgaggagcgagttgcgccactggccctggtcggacgaggcggacgagtcggcagagcctggtcgtgggacgcgaggccggccagtcatcgggctcgagtcgaatgagtcggtcgaccctggctgtgggacgaggtaagggtgctctccgccgccgccgaacgcatcgatcgactgccgccgaagattgagctgctgccggcggcggggtaggtctgccatggacgtcgcctcgagtggggacgacggtcgcgactgccacgagccgtcctcgtccgagtcagagaatgagacgtcatcaaaggcgatggtcgcaaacgggacgatcggcgtccaggtcggcttcgcgccgccgccactcgacgatggctgtggtgtcgaagccgatataagcggccgttgagtgacgcgaaagtcggcatcgtcagaagagcacgaggaggtgagcgactgggcatccaggcgagacgaggtggcggcagaaaaggtggagtcgaccggcgagggctccgccgatacgatctcgcgctctggcgaaagatacgaagccgggtcgattgccggccggaaccgcagctcggctgaggggagcgccagtcggcgatggcacttggtcagctttcgcgtaaacggccgggaacagctgagcgggcgaggcgcgcaccgaagggagatcgcttctcaggcggtgccaagtcactcgacgtacactcctcgtccaccttctcgagtggactcgccggagccggaggacgcaacgtcatcgccggcggctcgagctcggcctcgtcagagcctgacgttgtcgtcgtcgctgccgtcgaagacgagtggctcgagcgcgactcggggtcactgatgctcattggcgaatggtcgtcccggccgagccgggtcgcatgtgtggccacgagatatgcctcaagacttggcttgtgagcgaggccgtcggcagtgggtggaacgctggttgcaggctgaaagaggtcgtcgaacgacgtcgaaccgcctccgacggcagcgtacgggtcgccggtgacgatcttggtcgatggaccggtcgagagcctagaccgcgtcgccgcccgaccgatcgagccccagagcttcgacatgccgtgcttgggcagcggtgccgggggcgagcttggcggcgagaaggtcgagagcggcctccgccgggttgggaagagcggcggagggactgcagccgacgacgaggctgaccgacgtgcgccggtggactgcgagcgtcctggaccgcgaccatcgtcggcatcctcggcgtcaactgaggagaaggacgtcgcagaggtggtcgctgtgcgggcctgatagacggcctgaccggccggcgtgtcgaacgccctcttgcggtccttgacgacaaccttcagcctcttcaacaggctccgcgcaccgagtacgccgtcgagctcgggccgatgccggagcccgttgagccagctcgtgagctgcctgcggagggcgaccgagggcagccagtcttcctcgaagaaggttgacagccagaaggcgagcacacgcatggtccgcgtccgagcgagcacgagtgccgggtccgaggctgctggttgctgcgaggcattcgagctggcaccctcgctgccgccctcggatgttggcgaagcctcttcctgctgaagagacgaggggaggccgcacgcccactcaaagcggctcgtaaggtgcgcgagaagcgtcgccggcgggcagaactgccggtagacaagcagaaagtcgaacgcgccgtccgagtcgagcgcgctcgtcagctggtggatccagcgggcgagggtggccgcgaggagctggcggacgacgatggccgtagcagcggccgttgcgtctggcatgacttgggcagggctgaatgtcggcgtggtaggagggtgccccccattgccaccagctaatcgccagaggatgaagcgtgggtcgtcttcggttgctgccgaggcaagccactcccaaagatcgggtccggcaccggtcgctccgagctcgccggcagccgctgcgtccgaagcctgcaagccgagaacgggatcggccctcggaggcgtctcgggtgggctgtcattgccttcggccgccgcctctgctgccgattgacgttcggtccggccagagtcgaacgactgcatgcctcggaggaagggcccgatcagggagggcttcttgagcaggcgtgcgagcgtcgccgtcgatggccgaggccgcagcggctggtgcggctgcgactttggcagcggtggcggtcggggtgtcggcgatggtggtttctgctcggcatcatccaccggcgaggatcggtcgagctgtcttcctggcgggagcgtgggctggccgacaccgccctcggacgggctggagtgtggtcgaaggagaacgttgccgagattgagccccggcgacacctctcgcgacgaggcgtcgagcatgcgaccagttcgtgcgagagagaggccttgaaagtgaaagattaaatgaaaggcgaagagggaggtaggggggtcggagcgagcgagcagggaaggcgcgtcgatgcgggaggaggcgggctggctgcgcgcctcgggctctttcccaaacagggcccgtccgggcttcattcgaccctcgagtcgccgacgggccctcctccgcaactagttcgccctcgaccgccagtgctcgcctcccgctctctctcctcgccgccgcctctctctcggtctgttcctcgccgccatgtcctcccttctggctgctgccgtcgctccgcctgcccggctctcgctcggcgccttcctgccttcgctttcgctctcggcgctccgatcatcgtcggccgtcgcgagctcgtcctcgtccgcctcgtcgtcgtcatctggcccgactcctctccagctcgagcaggctgcgccgaccgagggcctctcggtctggcagacgctccaggacctcatcccgtcgatcgtctgggctgtcccgaagaagcagacgtcgaagcgggccaagcggctcaacagcctgaacaagcacctcaagccgaagcagagtgcgtgcttcctgtatctttcgcccgccccgcttcagccccagaccgcacaaggcgcatgcacctccttgagactctgctggagaagtcggggtgacggccgccatccgagcgatttgcgagctgacccgcgctcctctgctccccgccgttacccttgtctgctcgcctccgttgcctcgctttgctcctcccgtgtctctagacatcacgcactgccctgcttgcggcctgccaaagctccacgcccacctctgtaccaactgcctggcgacggtccggcgtgacctgaagaacgccaagcgcatccaggagcacctcgctctcgaggccgccaagaaggcggccctcgctgagggcaaggagctcgttgaacctcatgcgggcgtccggttgaagaactacctcgagacgggcaacccggcaccggcaccgaagtccatttggcaacctgtgagcgggagcgcgctgcccagagcgcccgcaccggcggccgacgaggcaccgagcggtatcagcggcagcagctgaaaaggggcgtcatcgactgcgggcgctctcgacgagagtggacgatgaccatggtccaataacgaacgattgggacgcctcaatgcaggtgggccggggaagaggagggcaactgacggtgggagaaggggaaggtcttgcgcccagccgtaacctctttgcagcctgtccgaagcgccttgacagtcgtgcaggacgatggacgctaccgacgtcttggcggtcaaaggcctgctggcggtcgtgcagacgggcgcagagactcgcgacgccccgtcactggatggctgtcgcgccggcgttcgaccttctgttctgcccacgacgtccatctcacccgcagctctccaaacctcgacccacctgtcaccgtgtcttcgcagcctcactcaaccgccaggctcagccagcaaatcgaagccgaccccgacgagccgactaaggccgtcaagcagccgttggacgactcatcgacacaggggcgcgacctcgccgctcgagctgccaccagcagctcagccgggctgcctatccttcccgagcgcctcgtcccgccgccggagatccaagaccacatcctcggattcctaatgagcggcgaccccgagtcgcttcggcaggacgggggtcgggcctggctctagcgttctgccgaccgggtgcgtctcgtccttctgattcctgtttcgctgccggcgccgcctcagctgacctttcaagcgttatctgctcttcacgccagtgtccacctcgtggaaggccgccattgagcgggccgctctcactttttagctccaggccgtccacattcacaccgaggtgtcagagctatgcagcgcgagtcagacaaaggctgcgctgctccggctttcggtcagacacagcactgacctctgatccttccttcttggccgccgacattaggatgtttggcaccaggagattgagcttggtgcacccagactctcagcgagagcttcgagggcgaccaggcgctcttcttttacgacgacggcgactggcgggctggcggcaagggaatgaataagttcatcgtcccgctctcgctcgagtagcgcctctttcgtcctgtccccgactgggtcgacggctggcgtaacccatgggagttcgacgaagacccggacgcgggctttcctggccgcttcctcgaggtgcgctcataaccgcttgcaacgtgcctcgtgcggtcaactgctcagcccgtctgtttgctgtttgctgacctcttgttgacattgtctctcgctccagatgaagggcatggactttcacaacgtctcataacgcgcgaagaacccgccgggcttcttgatcccagtctactcgttcctctgcgaggtcttccaacgccgcggaccggtaccgggtcgagcaggaggtccagaagcagaacgtcgagcctcgcttaatatctctccggatgcatgcgtcctcccctcgccgcttcctttcgccagaatgacccctttgcgtcgaacgtccgccggccggcatgccaggtcggagcgtgtgtctctccgtctcccggccttgcttcgtgcatggtagactcggtcggcagatcgtgctcgcttgaaagaatgatttttctatccgcccgatggtgacgccttttgtcgaagtgccgacgatgtcgtgactcgtacagtcgagtcggccggcgtttcgcgaacgccttcggccaggtcgggcgaacgacgcggccagatggtcagcccaccctgctgtgcctcggaccaccatctcgctctcctaccttattctagctccttgcaccgactgctaatggccgcctaagccggggcctgtctcgcggctcccttgctttccccccgtcttcctgccttcgcccgcccttgcgccgtcgtcaagcagcagccgcaaccccaccccgcgcccttcgcatccgaccgtcccccttcgaccagccgcccacgccgttggctcgacagccaaatcaccgttcagaggacgtccgtcgccttcattcatcagcagaacgggaaggccgatgtccgtttcgagcccccaagagctccaagcgaccgagattgacgtcctgcggtcaatatacggtcaggactttatcaccgacccgacgccgaatgcgccccgggcatggggtgctgaaaagaagggcggcgagtacggtatcagggttcggagtcgggcagacgagcgcgtcgagctcgtcctcgtcgtcaaggtcggttcccttcttcagctcgagcttaggtcgccagcagaggtcctgggtctagacctggagctcccccaagtctggtcctgtggctctcatagaactgacctcgccgtcgttttggcacgtcctcgcagtataccaagacctacccccggtcgccgcccatcctctcattcacctcgccctcgacgcacctgccgccctcgtcgctccagccgctgctcaagcaggcagtcgcgctcgcagcctctcagctaccggaggtcgttatcttcaatgtcgcctcgtttgtcgaggactggctgaccgaccgtgtcaagccgccggtcgacaaggctctcgaggagctcggcaagggcgaggccatgcgtgagagcttagccgccgttgtccgccggagggaggaggagcaggccatcgttcgtcgctcgactcgagggctgttgaccattgaagagcgcgctgaccatagcatcccgcttggcgcccttgcaggcggcaaaggagatggagaaggagacgctcacgcttcgagccaaggccgagcgcgagcgcgctctccggctctcgcatcaggtcgaggaggtcaagcggctccagcagtcacggctctcgcacacgctccccgcccacctccgcggcaaagcaggccaggatcaccacgctggcgggggcgtgcctggggacgggcacgacggctcgcccttcccgtcctcggccggctccggcgcggccgacgccccgcacgtctggaccgaggtcaacttcagcttgcccttgtcggtccaagctggctttcagactgccgagggcgagcagactgctggcccacgcttgacgttcaagctgctcggcggccggcggtccaagctatggaccgaataccttgccctgcctgctgagccacgctttccaaccgacgacggcgacttcgacacgtctgacgactacaccggctggggcgaatccaagacgctcctcagcggtggcgatgacgttcttgaccggcctattccgagcaatctgaacgttgtcaccgtcgacttcccggcctcaggctactacgccgcaccgcaggggctcgcaaagctcagcgcgctcttcgacacgctcggccgacttattcgtctccagtcgaccggcggcatcatccctgtgctgggtgcgaaactcgccgttctaccccgaggtggccgacggctcgccatcctccaggagcgtgtcgggcggggcgagcggctgcgcggcgttatgcgcgtctgcggcaggctcgaaggcggcatcgccaaagaccatctcgttcaggtcctcgccggcctcgagagcctgcgcgcggtcggcctgacgcacgatggtgcgtcgcgaatgatcctcgacggccggctcgtgtcgatgctgacgcaaatgtgcttgccagacatttcgctcgacaccatcgtcctctcgacctcatcctttggcggtgcgcgtctagccgagccctgctttcgccgtcggatcgccgacctcgaccggtccaacccgttcctcggccagacgcacgacatcggcctcgcgcacggcgaggacctcggtcatggcgctcgcgaggacgagctcggcgactcgaacgagggcgagcgtctgccctggaactggctcagcccggatgaaattgaggcgggctacgcttttggccacaagcgcgacgtttggcacgccggcgtttgctttctgcgcatgctcgccggaaccgacgtcgtctatcgttacgccaacctcgaagccgtgcttgagtcgggtaagtcgtctgctggtgatgaagggcgacgtccatctcgctgaccgtgcctttgtttcaccgttcagacgagtttcttgtcccaccggcgctgcaagaggtcctccgagggatgctgcacccgtctggcaaagagcgctggaccgcccagcaggccatcatgacgctctcgcaagccgacctcgatggcatcgggtcactgaagggcgcttgggacagctctgagcgctctggcgagaacggcggccgaagtggcagcggcgacaagggctcgggtctgtcctcgtctgaaagggctgcagtccctgccgatggctcgctgaccttgatccggcgcctctacagaaatgtcgaaggcactcgtcctacgtaacgcaggtggtggtccggcccggtcgccgaacaatctcctccagcaggcgcctcactacccgttcctgacggcgtcggctcacggccagcttccgcaggcgacgccatacggcatggtctcgcgctaccaggccgactttgaggaggtcgagtttctcggcgaaggtggctttggcaaggtcgtgaaagcaaagaacaagctcgacggccgcttctacgccatcaaaaagatcaagctccggccagaggacaatgagcagaaggtgtttcgcgaggtcaatgccctcagccggcttaaccaccagttcatcgtccggtgcgtcgtcttgccaactggaggcttgcatccgagcgctgaccttgttcttgtgacggccgcaggtactacacgtgttggctcgagacgacggcgccgcctccagacacgctcgccaacaacgactcgtaccggtcgacggccatgacgtcgtccgtctcgtccttgaccgacgtctcgtccgtcaaccgcagcaatgcccatagcccatcgacgaccgcgccgtcgcccttcctaggcttcgacggctttaagtttgagccagacgacgccgatttcctctcgatccgcggcggccagcagagccgcagtctgtcgttcccccggatccattttggcgacgatgaggacgacgaagacaactcgtccgacgaagagacgagcgaaagcgaaagcgagagcgacagcacgcgcggcacggacgacagcggcaccgaggaagagcgcagccgctcagtgaggctcaaggcgcggcgcaagtcgtcggaccgcaagggccgtttgctacgcaaggtcatcggccagcgtgagcgagaggagagcaccgactacgagcactcgggcctcagcgccatcggctggggctctcgtgtgctttacatccagatggtgcgtcagccgctgctgctcctcatgcttctcagcattctgttgaccgagtcggctggccttgcaggaatacgtcgaaaatcagacgctcaaggaagcgatcggccgcggcttgtccgaggacgagagctggcggctcttccggcagacgctcgaggcccttgtccatatggcctcgctcggcatcgtccaccgcgacctcaagccaagcaaccttctcattggtcagtcgcccccgggctgctgtctacggccattgtttgctgacgctagcttgcgcagaccacgagaactgcatcaagattggcgattttggcctcgcggcgaccgactttgccccaatggacacgccgcaggccggcacgccgctccagcagatggacagcacactcgacctgacgtctggcattgggacctcgctctatatcgcgcccgaggttgagtcgacgaccagtcgcagcggctccgagggccgctacgacgacaaggccgacctgtactcgctcggcgtgcgtaccagctttcgcccattttactcttcatcttactgacgccgtcttgaccctcgcaggttatcttctttgagatgtgcttccccctcgagacggcgatggagcgggcgttcctcatccgcgaccttcgtagcccacaggtcaagttccccgcggcctggccgccagccaaggctcagcaagccaagatcatccagcaactactccagcacgagccttcaaagaggccgcgagcaatcaacctgctgaccagcggtctccttccgtcggtcaaggaagacgagtacttctccgaggcccttcggacgtttggcaacccttcgtcgacgcgctaccccgtcctctttgaccacgtcttctcgcacatgcccgacccggtctccgattatacatttgacgacccggctcaggactatcgagagcatcgcgtctacgagtcgctcgtcaaggagcggcttgttgaaatcttccgccggcacggcgcgattgactatgatccgcccccgctcctgccggtgaccgagctcctcaactttcgccgcgagcccggcgcgcgcttcctcaaccgacaaggccagctcgtcgagctcccttatgacggcctcgtcagtgcgtagagcgtcaagcttgcctggaatggaaggcatggttgctgacccccgggctttgctagcctttgcgaggcacatcgctcgcaccaagcgtctgcgtctcaagcgctatcacatcggctcgagcttccgcgagtcgaccgccggaggccagccgcatgcgttcggcgaaattggtgcgctcctcccgcatgctaaggtcggtctactgctgaccactgcctggccctgttctgaccgccagcgtacgacatcttgtcgccggtgcgctcgatggcgtcggagtccgagctcatctctgtgctcgaccggatcctcgactcctttcccggcctcgccgagcgcgagtgggagtttcacatctcgcatgtcgccggtgtgtcgcttcgtcgcactcccagacgcctcggtcactaaaggtgacagacggctgattttgctctcacaccagtcctcgaccttctgctcgagcgcatcccctcgtcgcgccggaccgacgtatgcgacgtcctgcgcgagattggcggcaagacgacgttcccgcacgtccgcggcaagctcggccttgcccgctctgcgctcgactacctcgagaaatgggctgtggccggtgcgctgcatttgcttcgctccctcgcacaccttttgtcggctgacgacccctgcattgcttgatccagattcgctcgagacggtcctcgacctgctctgccaccgcttcccgccgctcgccgccgccctccgcaaggcgacgcgcgagatcgccgaggtgatcagcttggccgtcaagttcggcgtccggcgtaagattgtcttcaagccgacgctctcgcaccgcttcttccgctctggcgtcctcatcgaatgcgtccgtaagtcgccgaagcgcgaggtgcttgccgtcggcggtcggtcagtcgtcattccgccccttcttgatcgaggccctttgtctgaccagctggcctcgccccccccccccctgtcgtgcaggtatgacaacctcgtcgagcactttcgcttgccagagaccaacacgtctgtcgcgcccaaggctaacctcgttgggatgcacgtcgccctcgagaagatcacgtaccttgtcggccgcttcgagtcggctgagggcaagcggctgctcaacctcgagaacgaggacgcccgctcgttcgggcacgcacctcggcgatgcgacgtttacattggctctttcggcgcaggctccaagggttcgatggaggaccgcgttgagatcgccggcgacctctggggcgccggcctgcgagccgacctcatgtacgacgacggcctcgacatggcgctcgaggaggtgacggccgagtgcctcgcgcaaggtgtcctgtgaattacctccgccttgctcttcgaaccgcgatcggctcgttgaccctcgtttggcttctgctctcagcttcctcgtcattactaaaggcaaaggccgacctctgctcaaggtacggtcgatcctccgtcgcaccgaggaggacgtcttccgcgaggatctgctcgcctaccttcggcagcacatcacggatcagcgccgggtcgactcgctcgccgcaccggcaccggcgcacgtcctgccctcggcgacgctcgacggcggcatgcttggcggcggcggcaagggcgcggccgcccaggcacacgggcctgatctcgtccgacttatcctgccgtccgataagccgggcaaggactggaagggcggccagcacaagaagcttttccggcacggcaccaaggcgctctactacgagaaggcccggacgtttcttgcgctcgtccgctcaccgctgccgctctttgccgtcgacgtgccggcgtgcgtcctctcactcatggcgctcgacacggcctggctcgacgcggccgacgagcctgcggtatcgaacgcttggcggaccatcaaggagaaaactgcccccggccagacggcctacatggcgatggtccgcgacgagctccgcgacgcctggacgcaccaccttcatctgcagtcgacctcgggcgcgagcggacccgaggaggcccctatggtctggctctttagcgtccgcgaggagcgcgccttcctcctccaatggcctccgcgaagctaaggcacctaatgggcagcagcgcccctcattcctcacacaagaccacaccgacacgacccttgtagcacatccgcatccacgcccaccactgcagacctcgccccacctttcatagagttgtagcactagagatccctttccgcccgcagcccgcagcccgagaagaaacgacgtgcgatatgtgccggcgggcccttccattgcccttgcccgccctctagtctgctcaagcgaaagcggccttggctcagtgcgccgcgacgccagccatgctgcgctcagcggcctcgcggagctccgagatgtcccgtgcgcgctggcggctgaggacctcccgctggaggtcgacccgcgagcgactgggacgaggcggcgaggggggcgtcagcgacgacagggatgggtgagtaggtcaaggagggcacgcacgacttcatgtcgaggtcatggaacgccgcgccggcccacatgccgagcgagaggccgacgacatgtccgagccagtacttccggggatctgtagtggacgagcgcgagaaaggagggcggcgtcaatgacgagcctctgagacctcaggcgaaccgccggaagtcgctcaagcctgccggacgagcgcaagctaggaccgtcgctggcagtgaagctggaagcgccggccaaccagaccgtaggcaaggcggccgaggaacggagagagcaggaccaactcacagccaaagggaagggcgaggtcgcccatgagcatcttcgtcaggccgacgacggtgacgccggccgctccgaaacctgtcacacgcgacgggcgcgactttccaagcgaagcatcgtcgaccggagagagggaggcaggcgagcggcaaggtcagctcgagctcgtaccggccagagggtcgtagctctcgtctcgctccctccgtgtgcgccgcccttggttgccgacctcctatctgcaatctaggcttgcgcaagcagctggtctggccgatagctcgagcacccagccgccaaagggcagctccaaggcgtcacatccggtcggagagttggatggagagcaagggagagggtacgcacgccgaaccactgccagtcaccctggcggaccgacgtccagccgttgtgaaacgggttccagggcttcagctcgcccgagaggcgcggcggcagacgagaatcgatgaacgacatggccgtgtggtgtggagaaggagagctatatgaggttgaaggggcggtcgacgattggagggagggtcgagatgctgtcgcagggcgtcgagctcgggcgggcgccgcgggcgagaataaaagaagggccagctgctgggctgggctgtctgtcgacgttgaacagctcactcccgtcgacgaccctcccctgatcaggtctagctcagcactgcgtgtgtccgtagaggctgggatcctgcgacggctgacctgcgctgacgctcgcctcggacggttcacgcgctcgctgacaggctgcccgcccgagctcgacgccctgcgacagcatctcgacccccctactctctgtcaattgcatgatgtagccactctcacttcaccagtcgtcgtcgtcgtcagtcattgagccaaagcaactccgagtaagcaacgagacgccagcccagctgggccctccgactctctgactacctccttgcatctcgccgtcctcgcgccggccgtctttcagcccgcagattccgatggcacgcacgctcgcacacacgcacgcgcctgcgtgacttgggccctcctcgtctgaccgacctcctgtcgaccattagaaaggcgagcgatatcaagcaagcgaacaaatgtgtgaggtcaagatccaacgtgaatgcgcgcgggtagagtcggttgtaacgagtgaggcgacaaaggaagtcaaagtagtagcataagatgggccgaggggcgaccactagcagcagcagggaggtatcaacgtccccccctcgactgcccttaggcatgctggtcattgtgcccgccatggcgctggccgacgtcgatcccgcggagggcggcctcgccctgggccttctccttctcgttgccggtcaggacgccggcggtgtgtttagcgtagccctgggtattggcgtgcgcgaaggggacgtggtgcgggaagaagagggagagggaaaggacgaggcgaggatcggaacatgagaggagaagaggggcggaggggagggggtccaaagagatggcgtcagtctcatccctgtgggcaagcgcgcagatcagaagcggacgagcggtagtctggacgcacagcgactttctccttgaagcttagcttctcgcctgtctcggcgtcgatcccgcgcgggacgttggtcgctgccgtgttgaccgccgaggggggtcgcaagatgagggcggagggagggagtcagtccgcgtcggtgcgagaaggccgggcaggacgacgattctggtgcgcggacggacgaattgaggggatgatgtcctcggacgttgaaccagttgcgtcgggcgtcgtgttggctgtcagagacgagtgtggacggggcgtcagctgcgcggccgacagagcctggagatcgctcagccccgacccgcagatgaccgcgaaaggagggaagttaccagtctgctgcgtctggccatcgacgaccggaccctcgcgcttgatcctctcctgctcctcgagcaagcgctccttcggcgtctgccggctcgggagctcgtcccttctgtgcgcagcgtccgggtacgtcacaggctcggcgccgtccttttcaagcagcgagtatgtcgttgtcgctggcatgccggccggcgtgtttcgcgcgtggtggaggtgctgagggtcgtcggaatgaccgagcgtgtggtggtccgaggaggaggaagaggcggaagcatgccgtgcgtcgaccgcctgttgggcagggatgatcttgcgcgggagctcggcctgccggtgggcggcgtcggctggaggcgaaggtcgacaaaggaatcgtcagcagccggcagacgacgagctaggtcttgaagcacgcacggtaggtctgagaagcggcaggattggcggtgaagccgtcagcaagagagttagcccagggtcgaagcgggggcaagggtgacggtccgctgcggagcggcagcaggccccctcgagggaccggcagacttacgacaggctcggcgccgtccttttcgagcagagggtatgttccagcgactccagcaggcatcttgtcaggtctaggaggggagaaggggaaggttgggggggcgagatgggtgtcggacgacgagggcagaacgagatgccgcctcggcgtcgacgcacgcccacgcgagaccgcgagcgtcggcggcgcgcggcgtcatgcgtcgtcggacgtaccacgcggtgccacatacttatcgccttctggggcaagttgacgaccgctcgcagttgtgccttgtccaccagcaccgatccgcccgtgatcatgcagcgagatggcggctggtgcaggacaaagtgctcgcgcgccacgggcggccaaacggacgagagaagacatgacatgcgcaaagtcgcgacgctgcaatttaagcgcgcgcggccttcaggcaggagggggattaaaatgtggtgcgtctggaggaggaggagggggcgggtcgtccggtggtggtggcggcggtggcggcggcggcggatgagcaagagtgtccaagaagcagccgggcaggggtcgcgcggccgacgggtggccgaatgaggggtactgagctaggaaagccggtggccgattctgactggtcggttgaggtggcctgtgtagcgagtaaggggctggtggggggtttgcctcaaagggcgcggcgtgtcgcggcgtcgcttccgtcgcatgcacgccgcttcgaccagaggcagcgaccggagccggcaggaaggcgctcgacggacctgcaggatgccgaacggaagtcggatggccaaacgatgactggtgggcgaggaaagccggcggacgcggcgcgccattgtgcggcgcgagcgagcgcggtgtcggcggctcgacgcgacttgccgtcacggaatggcgaggggtctgttgcgttggcggcagctcagtgacagcatcccatctcgaccgtcgtgctggtcgtgcctcggcgccctcgggacccgcaggcgcagtcgtgatcgggctgccgctgggtccgctggccgcctgcgaggtgggcttgacaaagactggcgccttgatggtccgggttgcttgtacgagctggggtcctcttgtttcgtcgcccgctggccggaagggggcgaaagaaggaggaagcagggcctccgtccgtgatgcgacgaggttggtttttgcggatggggccggcagtgggggcggcggtgcaggctccagagggggcggtggaggtggaacatcgtcgggcggcggaggcggcggtatagagtcgcagggcggcggagaaggaggaagggggacgtcatcggtaggcggaggtggaggagggtcggacgacggcggtggcggcgttcgaccttgaacggcgagcgccgcagatggagggccttgagagaaagtcttgcccttgccgttgcccttgttgccctttcctgaagtgaaggcaccccaagcgctcgcagcacccgcgctcagcctcgcgcccgttccgcgactgccctccccgaccattgaggcaacagctgccgtcgcaggcggagcgccttccgcccaggccttcttggcctttggaaccttgatgccggcggccttcatcgtctgtcggagctccttggcttcgcgaagtcgctccttttcacgacgctccgacgcggtcgcggtgctcgacgtgagtgcacgatgcgtctcggcgagggccttcaggcgctgtttcggccaagcagcagggagcaaagttagctcgcggccgggaaaatgggcgagaaagcgaacgtacaacgcagtggtgatgagcccacgactggaggtgctccccatgctgggcgacgttcgagtactgcttgtcgcatgcctcgcagtagaagggccgaagggtcgatcggatctccttgcgaacctcagtcttacgcactgcctcatcctgcagcattgagggagtaggatcagcgtccgacagaggcagctgagtcgacggatcaaggggacgcacaacctccttgccgcgctcgacctcgctgaggccggcccagcgctcgctcgcgagctcacgccggcccttagtggtgacctcgtccatcacgcgtgtgtcctgtccaagtttgccgattccgagtccaggcgcaggctccgggatcgcgatcggcgtcgtacggcctggtcggtgcgacacgaggggagcaggaggcgcgcagcgaggtcgaccgagcgggcggaagggggaaggagcagcgacagatcgtcagcccgtctgtacgatcgtctaaccggcgccggcatgctaccagcgtgacccagaaagcaagatggatccagagcgaaggagagcagacacgcaccttcgccctcgcggccgaggccggtgccagcgcccttccagcccatcttgacgagcaggccgtagccgacgttctcgcgcccgacctcggtctgcattgtcatcgacatgggcccgttgtagctcgagcttgagcggtcagcctcgctgtcggccggccggaggaagcgggacgacgtcggccggtcgtcaaagtcgctgccatagtcagagagggacgaggaagacggggcgtccgactcgccgccgcggccgccgccgtcatcggccggctcccgcgaccgcttcagcgacggctggatggcagacatcgagctgagacggcgaataacgaggtctggctagagctggaggaaggaaccgcctgttggtgagcgagcagggcgcgtgggtcgatggtcggggtcgtggtcggaggcagggggcgttgggctggaatcgtcgcgcgtcgtccgcatcatcgaccgggccgacaaggcgtcgaatcaactgtacgagtgagtccacgtgcgctcaggtcggcgttggcagttcagaagagaagagaacagagagacaaaaagcaataatgatacagcgccgtaagggagcggtgtgcgaagggaagcggtgtgcggaggggaggaagacatgagcgggcgcgcccgcgaaaagagagagtacaacgacggggctggaggacaaggcagagaagacagagcaagggagcggggaaaagtccatggggtgagagagaggaaagaaaaaggcaagcgaagaggtcactcgctcgtcgggctgtcgtcgccgccgcggagaaacgactcttggacggccgtctcccgcacgctggcagcgtaagcggccgtcgtcgcgccgagcagatcgctcagcgctgcccgcttgagaggctggaggatcgcgcccaacgtcggcgacggcagcggcggcggcgacatgctcgtgtcgcgcggcatcgaagccgttgactgggccggcgacgccagagggacgacgacggtgccggtcgttgttggaccggatgacgacgaggccgacgacgagcccctcgcccgccgggccttggcggccgagttgacgcgggcctgcttctcggaccggaagtgctggctgtcgaccggcagggcgagtgagtcggacccgccagacgaccgggcgtagggcgagtagcgggctgccgggcccgagaaggatgacgacgccgacgacgacgaggccgagcactccgaatagtgcgacggagagggcgacggcagcggctggtggctgctcggggcgggtgtgccaaacgcagcctggccgatccgctgctgctgctgctgggcgacgagtgcgtgggcctggagcgcttggtactgctgggcgagcaggaagagctgcgtctggtagttgagctgcgaggcgatgcgctggacagagagagggaatcggtcagcaatcgcccggatcgttccagggcgtatgcgatcagagctcggacgcacctcttcctcagcccgcttggacgagaggatgctcatcagcatttcgcggtcgccgttaccgtccttgccaaaggcgtcgaggatctcgcggagcgacggcggcggaaggggctgggccggctgctgctgctgctgctgctgctggccgttggccgcggccgcgagcgggttctggtgcgggtggtgcgaggcgggcgaggcgaacatggcgaccggtgggagttttgcgttcgagagaaaagagagagagagaggatgggtgtcaagaggacagaaacgagccaggcgaggagaaaaagccttgacccccgtgctttgcctcgctctcttggctttgctttcgaaggtcgtcctctcgcagccgaagaggtcttggtggccttggctgcttggcgaccgcgaatagatcgacggaaaagggaagccgttgctggccctcggaccggtcgccatcgtgagcctcccgaccgttctctgatcagcaggccggcccgagccaggatcagcaacggagaaatcagggctgaagggtcaggtcttgcagctgacaggagttgagggggtaaaacgagagtaggcaacgactgcgcgaaatcgcctccggcgccgagtttaagcaactcgatttaatatttcagtctactcagccacctcgcaacgcgcgcgggctgtgtagtcgcggctcgcctgccttgcctgaccacgaaagagttcgtcctcgggcaacgcggccaaccggcccatctcctgacccggccggcccgcctttcttccttccggaccttggccgcgcacggtcagtcaacctggctgctgaggacgaggtcattcggtgatggtgacgactctggaagccgcttcttcttacagaagctggctaattacggctgcgaatgcaaacggcacctagtcttggaaaggctgacgttcgccgtcgaggccggcggcagcagcagccgtctcgaaacgagatgctctatttctgccctacgctccaagccggtcggttcgaaacgacaggcaggccggcaggcggacgacgaccaggtggcctgcttgctaagtcgtgcgctgcaggggtcgtccgactgacgacaaggcgccttcccgggtgacagagtgaagatcatgatgggatagacagaagcagcaggaaggcaacccaaaatagtgaaggagggcaaagggatagagggatagtgccaagacggatgcgaccgggaggaagacgcatgtgttcttaagaggcgaggaggactcgtcgtttaccagccctgttgagaagaaggcccgcagcagcagtcagcacgcgagacggaaaggcagaggctgcaaagggaggacgactgacaaaggcctcgcagtggagtgagacgtggccgaccttgccagtggcgacgtcgccgagagagaaggccgtcgcgttgtcgcggagggctcgcttcacgtcgctgctcagtgcgtgcgggccgcagacgttgatggcaagtgcgctcgagccggcgttcgtgacggcctcgcggaggagcgggccgaggtcgggccgaccctcgtggagcgaggtcgcaaagagcagggccgagggcgtcgggccggccttcttctcgtcgacgtcgggcgacgagggggaggcagtgttgggcgagatctcgtcggacgagttgcgcgacgacggaccggacgagccagtgaggccgccagctttctcgttgaggacggtaatcgggagcgtgttgcgcgtgacaaagatctggaggtcgatgttcagcgaggcagggcagtcgcggatgtccttggcgaggctggcggcgatccagtcgatttggtctggaaggcggcaggaaggggtgacgcggtcagtcgcgcgacttgaccagcgagggagcgcggcaagacgacgaaccggtcgtccggacgacccaaatgaacgagacgtgcttgacggctgacttgccggccttgcagtcgcggacaatctggctcaggagcccggccgtgtacgagatgccagagccacctgccgaacagagacttctcgtcagcaaccggtgttggagaagatcgaataaggcagaagacgacggaccagcaaggaggacaacagactcgaacgaatcgagtgagcgcacgtagccgtagggtccgtcgatgcaagccgtgatctcggccgttcctccgccggcacgggcaatctcgccgaggcgcttggtgaagccgtctatggatggtgcacgagagtcagggccgaagtcgccaacggaaaggcgcgagaaggaccataagagcacgcaccacgctgcgagatgatgaacgagacctcggacggtccgtcggccttggggatcgaggcgatggctgcgttgggagaggatgaaggagtcagctaagcttgccgggcggtcgagacgacggggaagaccgcactgaacgggtgggcctcaaagggaaacttgctgacggtcgggcagacgacgtatgcgtgctggccggcaaaccagcgcatcgagcgggtcatcttaagctcgatggcgtcgccaggcaggagcttgacagtggcgaccgcagaaaagttggtcgacgacggccgaagcgagagccaaaacttgttgaggacgagcatgttgacgagacgggcaatccggtcaaagccccagatcacgaacgacggccagacccagtaaccgaactcctcctgttgaccacaggtaagcagggtcagcttgaacaaagacttttagggtcgaaagccgtgtcgcacccagtggaagtaggcgcctggaaggtcaaggcaaaacggaggtcaacaaaagaatttgtgcgcagcaaagagggcagatgaactgactgataaggaagatgagggcaaggacgatgtgcgagataaggaaggcctcgtaggcgacgcggctgaggatgggcgatggcagcgcgggtcagtcgcgtgcttgcccagcaatcataatgactacgaaccgaagcagcggcttgagcgatgaggcgacgaggagcgagtaggcgagcagggcgacgacgcccatctgcatctcccaagttgtgatagcgtgcttgcccttcaggccgatgatcatgccgcggtcaatcgtgtggatccacgagaggatgagacaggcccgaccggcggcgcggtgaaggaagttgagctgcagattcgactcggtcagcaaacaagaggatggcgagccgaagaggcactcatagaggcgcgactgaccttctcatacgagatgccggtcaaatctgcgcaaggtggaaaaaggtgagcgagagagagaaagggaatgagcgggtcgcgacgcacaggagatgacattgttctttgaggcgaggccgacgatgagcggcgtctggctgaaggcgaggatgccgcaccggttgccgaccatctgggcctgagcgaggcgcgttgtgttgcggatcgggactgtgtgagaggatcgtcagcctttgcctgcaagaggatcagacgtgcaccgacacgcacgatgcagaagtccgagcaggaggacgacaaaggtgtacatgatgctccagaacatctcgccggccgagaccttccaccagaggctgacggtgacctcgcgccacgagaacgtcttgttggtggtcgtcacgagcgcgttgacgctccgggtcgccacccctggccgggcagccgaggccgacgcaaactcggtcttctcactgctggccttggcgagcttgagcgcgcgccgacgccggtactgctggtggccgatgcggatgaggttgacgaggatgaagagaccgatcacggcggcgaccgtccacctgcagcaaggggggtccgaagatggtcagcccgcgagagggattcgaggcggcgtgcgtgcgagtcgagtcgacgcaccagaggtagagcgggtggttctgttggtaggatctagaaaagaggaagatcaggtcagtgctccaatcagatctcctagcagggaagcgggcccggcgagcgggaaaaaaagggatgggatgggagaccgtacttgcgaagggcctttgccgcctttgccgccttgtcggccgccttctgggcaggcgtctgctcgaccgaggcagacggggcagcagcagcagcagatgttgggctggccatgacgacgagaggaagggaggagggagagagggatgaggatggtcgttaggagcgaggaaaaggaaaaagtgcagcgatcagattacctcttgcaaggtcggggcaagcgttctgcaaggggcggaggatctaattccgtccatcagattcacagattagtgcccggggaagggcgagaggggtggtccgatcgtctttcgaccgggcgcaaacagggcaatcaatgcgggggagaacggttagctcgagctcgaggcccacctttctgcgcccgtcacgtcgcgccctctcacgagccttgaaacaagctcgatcaggagtgcggttggtcttgtcaatacgagactgggctggtagtcaggagcatcaaaggtcggtcaaggcgcgtcgacggagggtgggaggattggcagctcgctcgcgcctctcctgctggctgccctcagctcgccgctcgggcacgccggggtctctcctacgggcgatcagcagagcccggggcccaggcacaggcacccttcgcaggatgcagtggcgcgcgctcaataacagaaggcgagtgtgtgatgcccggatagccgggtcgagagtgggcaaggaaggcgagacgggtcggtcagtagactcagcccctcgggcctagacggcgtcgttgacggtcgggatgttgctgccgctcttggccctctttggaagaaggtttggacagtcggcctgtgcgagccgggcgcgagggtgttctcgtcggcttcctcaagccgaagacgagacggcggccgagcgagagagaaggcggcggggtgggtcgggtcggttgctgccgctgcggcctgagggcaggcacgggcgtcgtgagcttgcgccggaggatcggtagaggtgagtgggaaactcagctgggagagctcgcgctgtgcaaagccggccctcgcctttatacagcagagagcgagagggggacgcacgctcggcttcttggcgagaagagagggggggtcggtagcggggaagcctgcgcatcggaggcgccggccaacggcgagggttgggaccggccgtctctcctctggtagaacgccgagtctcggtgggcgcaagcgggatggttcggtggttcaggaggcagatcgtgttctcctgcgggcccaggtgggtcaggagagcgtgagggtgtccagccgacagcactccatgaggtgagtaatggaccgagcgcaccctgaagcggccagcacagagggaggatggcatgtcggacgacttgcagcaaggtctgtcgaggcaaagagaatgcgccgatcagcagttttgcagagagcagcgtgagctgcagaacgaagggctgaggaaaggagatcgattcgccctgacatctgcccttcaggaccgctgactatcctacttccgacgaagtcttaccaaacgaggtaacgtccttcttcgttcgggaggcaagagcattcgatcgctaagctcaggaccgagggcgccgttttcaagagggtcaaaggggtgcgctgacgctcgtgacggccgtgtgcaacggacgagtatttctcccggcagcgctcggactcaagaccagtcgagaggggccgtcagcagaacgttgcagatcgagtggccagaagcgaccgggcggctcgctgtcgctgtcgttgtcgttgtgcgtcccgcaaaggaccaaccggcgctcggcaccgtaagaaccgcgagtcgcctgcggtcatcgcccgactgacaggagcgacctagggccgcgagctgctcgacttgaaggaggcttctcgagcgttcacccgtcgaacgggggtctctggagcaggcgagggggttggggccgattgcgagagtggcggcctgttgcttgcctcgtgtctaagtcgtgcttgacgctgccctccgccagacgagcgaatatgggcggccttattagcagagaggacggccgaccgactggtgcaggtcaaagagggggatcgagcaggggagcaggtgagtgtgcgcctgcagcctcgaccgactggcacgtcagccatcctcgtgcgacatcgccaggtgtggtcagcggccgcttcggatagtcagtcagccagctcgtccgagcatggtcgtcgtcggcagggagcaagcacgactctcgaaactcaggcctgccgacccggacgacttcccccctcagccaccggcaatcggcaacggcggcggccaagaggtcggcgcgcagcagcctcactcaattctctgagcgccgccgacacttaacggaactcgtcccccctccctctgactctgacccactatacctcaacgacctctgctcgatctcgcgcgtttgcccacccactctcccggcctctcgcgctctccttctcgagccgctccttcctccccttcgcatccagtcagtccgagcttcggacggctcctccgccttctgccgctcgcagccccgtgtctctcgccgctcgaaccgacttccggctcctctccgctgctcggctcgccgccaccttcttcgctcctcgccaatttcttccagcaagcaagctcacggcccttcgccctccctcgtcgcctcgagccatgtcgcgctcgcactcagcctcgacgacggtcgtccaagcccgcgctcggtcggcgaccctctgctcaggtcagctcagcccaccgctcgaggactccataagctccgcggccaccgtcgccggcagcaacggcggcaccagcggcagcaccagccaggcggtctgggccctccggacgcactctccgcctcctgcgctggccgaaagggtcgccgcttggcgcgaggtcaacagggagcaacgaccggctgcaacgctcggtgagtggtcgtcgttcaggcggctgcttccgactgcaccgttctcgttcgttcgctgaccgctgcttggctcatctctcgccaggcctccgtcgcaacaagtcgctcacccaccgcgaagcaggcgccggctccttcctccactcggacccgagcccgtcgcccatcccgccgtcgctcgagaactcgccgtacctccagagcgaggcctcgcccttctaccggcgtgctcgcctgcctggccgggcagcgacgagctcggtcgttccgacgctcaagtcgctcaacctaacgatcgacggcggcagcacggtgggcgctgcgccgtcagcctgctttacaaactcctcatcaccagcggcggccgggtcggcatctgacagctggggcgagtcgatcgtcgacagccctcggccggcttatccccggcgaccgggcctccagcagcggccagcgtcgacgccgacccggcgagccgtcagcgagtcttcctctggccggtcgtcgtcgtccaactctggcgactcggactcggaaggcagcgtcactggcggctggacgcccaggacgcctcccctccgcgcagccggccttccgggctcgcctatcgtcggcggcgcgggtgtcgagccggcgcagaaggctcggccgggtatgccacctgccagggcatcgtacccggttctcactggctcgggcaaggtccaccctccaggccggccgacgctcgcggtcttgctccctcaagtcggttccttccaaatggagcgcatcgagcgcccgcccgtccgggtcagcttggccgaccgcccgtagtcgtcgccagccctatcggccctcaaatcccgcagcgggcgggtccctgcttctcccatctttgcttttgaactactcgttgtcttggtctcaccggcgcacaccacttcttcctctccgttttagtccttctgatattctagcgcaacagcttgcgccattatctcttctcctatacctctgcgcacacacacgagctcctcgtctccgtggcccatcttctcatgacgtctttcggcacctctcctcgtggttggcggagccgctggcggcggaaggcgcggcataaaagagcgagggggaaaagcaaagacaaagtcgcgacagagtgcgcgacccaaaggacaaacagaagcgaggcggacagacagacaagaaagaacagagggacgacaagagagagaacatgggccagggcctaaagaagacggagggattgagcgagctctatcagtcgtgctgggtgacgacgatgaggaccggcgatcgcttctcgctgctgccatagagaccgagcgagcgctcgtcgtcgggcgtaagaaacggccgaccacgcgcgctgctgctgctgctgccgctgccatacagcatccagccgatgcacgcaagcaggccagccggctcgagcacgagcagcgcgagatgggccgccgtcatgttccaagcgagggccgtgtgaagcgcgagcgagaagcgagagaggacggtcgatgcaagcaggacggggggcaggatgaagaggagaggcgggagggtcggctggggcttgggcgtgaggaagacaagggcgagggcgagctgcgagcagacagaggggttggcggatgagcgaggggcaacgaggatgagatagagggagattagggacttacgccgaggaagaggacgaggatcgagaaggacgagaagcgggctgcgacgtcgagcagcgggccggcttcatgcgccgccgcgccgatccggagggtcgccgacgcaaagtcgtcaaagaccgagtttgagctacgagagaggtgaggatgtcagccaagcaggctcttatgagggcaaagagggaggtcgcacagaaagagcatcgagcccatgatgccgcacgtcgcggaagccagtgcgagccgctcccggcggcccatcccgccggcgcgagcgtcggctgtcttgctgtccgtcggaagcccggccgagagagagtagcggccagcagtgaggtcgtcgaaccagctgataacctctgccgtgcacctgtcgcagataggcagagaaggacgtcagtagagtctccgggccacccagcagaaggacgcccgccctctcgcgctgcgcgcttgcttgctcgcctactcgcccgcacctgacaggcaagggaaggaagttggacgtacctctcctcgacgagaaagaggaagacgagaagtgcgagaaagaggttgaccgagggcacgacgtgcgaggcccaagtgcttccgccattgctggcgaaggcgtcggcggcagcggcgccgtcggccaggaggcctgcgcggatcgaggcggggtagagggaggcgactgggtcggcgacgggggcggcgccgaggagggtggagtcgaccgagtagctgaaggtcgttgcgtggagggctgcgaggagggacgagacgatctgggaaggcatggtgcaagggatggcgggagggagcgagtagggcgaggagggagtgagagtcggtggagggggaggaaacgagagcggccgcgtgtgtcgggcaaagggcgtgtgtgctgaagagcagaagaggccgggcggatccaagaaagcgagagaagagagagcgagcagtcgttgcggtgaaggacgagcgaaaggaggcaggctgctggccggagcaacaactcacgacgcgcgcgcgcacggacacgcgcgggaaccctcgccacgcgactgcacgccgatcccttctccgcccgtcggacccgagatgaccacggcgcaactcgacaagagcaggacgcgaaccagagcaagacggggatgtcatgagatccaaaaaagggggcgcgctcgcgagggagagagagacggacgctgggatgagagaaagggacgaagggcggggcgcagacggagggcgatgggagtctaggcaaagtggatgcccttctcgttgaaggccgtcaggagcctacagcggggcgaggacaggtcagcgctcccggttctaagaaaaggcagtggaaaggcggagagactgagacgcacttcagcaggtcgtcgatgtccatctttgccgcgcgctggtcggcaaagcccgtgtcaagtaagatgttgtcgacgatggtggcgaacgggacgtcgtccgggaccatctagaccgagagagcgagcgtcagccctcgttgcagacgccacgcgagagaaagagagagagagagagagagagagagagagagagagaaagagagagagagcgggaagggggcgcacctcctcgcgctgggcgagccagctcttccagtttgcctcgagcatctcaataacgccctttgcgctaaacccagcgcggaccatcttgttccgcctcgaaaacaggacgcggccgagcccatcaaattcctcgaaccggatcggcggcggcgggttctttggcgtgatgcggacgaccgagctctcgacgtttggcgccggccggaagtttgacttgccgactttgaggatgtgctcgacgcgcgcaaagagctggacgttggccgagaggcgcgaccagagctcggaccccggggttgcgcagagccggagggcaaactcacgctggaacatgaggacgcacgtccgtgggagcgggcgggtcgacagcagcttgaacacgagcggggacgaaatctggcgtcccaggatgagaaaggcattagcggttgcatcgacactcggtggatcgtcctcctcggagtacacacctgatagggcgtgttcgagatgcagacgtcaaagtacggcaggtcggccttgacgaaatcgccaatcatgatctcgagtttccgctgctccggccttgcaccgcaaatgaggacaccagtcaacctctaggctgacgccgaactccttcctcaagagccgtagtgtatcgggcgttcctctcggactcactttcccatgaagcgcttcttgacctcggccgccatccgggggtccatctcaaccgcgacgcacttcttgaccttttcgaggatccggaccgtcaggttgccggttccgggcccgacctcgaggacgacgtcggtcggcttcaggaaagactgcgccgacaggagagggagtggaggtcagagagagtcggaggaagtgcggaggggtgagggaggcacggaccttgtcgacgatgctggagtggaagaccgagcgagtgtgagaaagagggttagctcgttacgcgaagggaaggatgggaggggcagatcggcgcagacatacctctgggcgacggccgggttctacgcagcacgcgacagaggatcgagcggcgagcaagtcagcagcaggctccctcccacctcctctctcccaccgagacctcagccacagccccacactcctcccacgaggaaggccgcaccttgaggatatgctgcccaaacttgtcagtgttgaacagcgggttgttggtcccgccctcgccgccgccgccgcccgtcttcgcggccgctttagaggacgaggagcccgcggccggctggtgggcggccgacgagaacttctgcgaggtcgcacggggcatgcgggcgcgtgcgaagggttggtgtgagaaaagtgggttgggacgctgaacggagagccaggaggagttgaggtcggcctctggagtcggagctagctaggtgcgagtcgagcgtaggtggagagagggagcgaagctgaaggacggaggcccaggtccagtcagtttcggactcacatcagcgcccagcagtagagaagacaacgaccgaccgaaatggcgtgtatgctggctgggaggatggcgggtgaggtcggctggtcgggtcaggggcaacgagcaggtgaacgaggccggccgagccaaaactgcgcctgcacaagaggtggccggctgcgcgcccgtccttccttcgacctcgaccttcctcctcaacctcgaccagcagcagcaacgaggatgctcctcctaccgccgcccaacccgccggtagtctcgctcttctcggccgatctctacccacaccctacctggtcgagcaggaccgaccctgccctgcccgacgactcgctcatcgtcctcctcccctcgccctcgccccctctgccggccgggctcatccatcgctcgctcccaggaaccgatatcgcccatctcgcgctccacatccagtcgccgaccgtccaaacgacgtcgctccgctgtccggccacgcgcgaccaggcgctcggcgtcgagctcgcctggctcaatctccatctcgcacggctcggcaggcgcgagctcgcggtcgagtgtataatccgagacgggcagggcgtcgaggggcgggtccggtgcgggacgtttaccgtgagtctcctggctgtcttcccctcccccttgctttcgatgtactggagttggcgctcgctggatggcatgaccatttgcctttctttgctactctcggacgacggccgctgacctctccctggcaagtagcacgactcacgagctcgcccgtttgccccttttgcacatatgcgcactcgctgacctcctggcactgccctcttccgccctgccctctcttagaccgaagcgcacatcacctactcctcctccaaccgcccgccgctcctgcaccttccgctccgctttccctcctcctcaccctcttcctcctctgcgcccgtcctcaccgcctggtcacacctcgccctctccctccctaccctcctcgcacacttctctgggttagcatgctgatcggggcgagcgggccccgggggacgacggaccgtgagcgtcgtaaactcgtagctggccgtttcggacgccgtctttgtcacgagcgagagcagcgtcgactttccaacggacggaaagccctgccatcgcccaaccgaaacccaagcgtcagctctcgcttctccgaggctcaaccggcaagagggacgcacaatgagtgcgacccgcgcgtcgcccgacttcatgacgtcgaacccatcgccgcctttaccgctcttgccctcgggctcgagcagcatcgcccggtactttgcgagcttgcctttaagcaggccgaggtggtactctggaagggcggacgggggggggaacgcgcagttggcccgaggaaggaagtggtgggttgcgagcggcggagccggacgagaagggtgggagaggtaggtgtcgaatagcgcagacgaggaggatcaagcagagatacgggcaggcaatgccatagcccagcaggcggacgagggcatgaggatgggacgaggaggggaggaggaggtgcgaggtgtcagtcagtgctccccccgcgagcgagagccgtagagccgcacccgtcgccttgttcttctgcgtccggctcatctcgagcttgacagcctccatctagcagaacggacatcgcgcgcggtcgagtgcgttcaatcggaccggcgggcggagagaggaaaggggagggagaggcgagcgaaggggggcgtcagtgagctgagctcggtcgatgggcagaagggagggaggcgacgagctcgaacggaccttctcaaggacacccatcttggcttgttgtttgtaggtaaaggtcgccgggtggatgtctgtctgccaggctgtccaagaggaggaaggaggaggatggaggaaggaggatggaggcaagggggtcgacctgacgctctcgcatcgtctctcgcgcgtcctcccgagcgtacccatgcgtacgatctcctcggaccactcagatatcgaaacggctcgcactgtcacttgcgaagggagacagagagagagagagagagagagagagcggacatgatatcgcctcgtcgcttgagggcgagcgagaggctaatggcaggtatcgcgcatacagcggcgggtcgtcccagtcagtcgaccgggcaggccggccgaatcgacgcgctgacaagtcgcgctcgagtcgatttgacgtatccttctgtaggcgagagaggagcagccggtagggtcagtcggtagggcggccgagcgggtcgagcagaggaaggcgctcgaatgcgtacggcccggccgttggtatgccgtgtcggctggtcgtccagcggtcatccgaagccaactgcgcgagagcgtcgcataagggaaagataagaggggcatgttggtgctctttcgccggccgacaagcgagtaaacagattaagagccgtcgagttggtcgtcgttgtcgctggaccattttcgtccgagcgcgagcatctcggcccagttcgccgcaacatcgactgagcggccctcgagctggactcgggacggcatgcgtgcagagtcaagcgcatccatgttcgtcggcggcggcggtggctgcgacggtccaaagcgcaagccgaggccgaagtcgaggtcgttcggcgggctgtggaacgcgaggaaagcgagcgcgaggaggagaatgttgagcatgagcgaggcgaggagcgcgttggcgatcgacgacgaggactctgccgacggcgtgtcagcggggatggcggggttcggtgtgccgtcgtcatcgttggcgtctgtgccattgccctcagaagccgatgcggtcgtctctcctacctgctgccgctgccgatggacatggccgccgccgtcactgcccctgaccgccgccaccgacagcgctccgttaatcccacccgacgacgctcgctcccccgctgcaccctgccgagagacgtcgacctcctgcccgagtcggccttcgaggcgcgtgagccggtcgtccagcgccgtcaggctaggagcgagcgactctgcgacgagcgttgcgatctggcgtactgcgtccgacgacgacgaaggcagtggcggcggcagttgtggcggcggcggagggaggggggcgatgtcgaaccgtgcgtgccgggcaggatgagagtgcagcgcgctgccatgcgtcgactggcgtccctcgcccttcgaagccacctcgatctctcctccgccccgagcggcagcagcggcggcggccgccgtcgtcggaatctgtgccctcaaccagccaacgacaaacaccccgagccgctcgacgagcacctctgccggtcgccggtcgctcgccttccccccttcaccaccaccaccaccgccgccgtcgttgtcgatgaagccgccccctcccgcagagccgcgacgcgctccgcgaatcgcaagcgccagcaaccggacagtccgtgccttctcgcgcgtggagagcggctcgagcaggtaaaggtcgtcgagcagcggctcggccaagccgagcaggaccgcttcgtccacctcgtcctcggcgccaccgccgccactgctgctcggctcgtcatcgaaggaggcagtggggtcggcaacgccagaagacgagtgagcgagcgcggtgagtttgatgagcgcgtgccaggggcgttggagctgcgaggggagagggaagtcggccgaaggaaagccgagagtcgctggaagcggggtgcgcagctgtatgagttcggccgaggtgggagagtcgacgttggcacagaggagtaaagagagtaattttggtcggtcagctcgagcgttttgcaacgatcgtcaggcggatcgggcgcccggcggttgtgggagggagggaaggagggttgaggccgcacgacttgctgttcatcgacgggaacgagcgagcctggctcgctgaagtctgcagagagaagcccagcgagcgagtaagaggccaggacggctggcgagggccgccagctgcgcgggagtgagcaagggacgaaagtcggatcagtcggtcgaacacctggtcgcccccaactctcgcgcgacgcgacaaccgaggagagctggatgaacccacttgtgcgcgaggatgccgcctggctcgagccaactcgcacagcgcctcgtcctccagctgaggagcccggcgagcaggtcgtcgaccccgagcgcctttgcgaccgcccgggcagtcgcaagcggcagccagacgtctgcgtcgaacggcgcccggccggcgaggtcgagctcgactggtgcggcgtcgcttgacagcgacagcgaggctcgggggtccgggtcgcggaggagcgtccaagcgtccgagggtggccggccgagggcgaggaggaggagcgagctcgagacgagcggctcgcccgccgggcttgggtcgagcgagcggaggattgggaggccgaggagcgtcgaggcgaggaaggcgctcggccgtagatcgttgggcggagcgtgggccgaggggaggacaacgaatgagacggccagcggggttctgcctcgggcgggcatactgtgggcggtgcgagagataaagaggcagatggccgtcaagggggtccaagacggtcgagccgagggcacgcgcagcagtagccggccgcctcgggcgagaaggccctcagccggagcctccgcccgcaacctcgctcttagacaacagctcatacgagagctgctaccagccttccatcatctgctgtcgacgctgctgaccggcaggacgacgggctcgaggatggaccgtgccggctgactccctcgccatcgaggcaatgaagccgaatcggcctccaccttgcccgccgcccgcccaactctgctcgagacgagtgagccctctctctctccctctctgacctctacctcccatctctctacctcgctctcgctctcgctcgccatgtcgtcccgcctccaccagaccgtctcgctcggcggcaagcccatccaccgcatgtccgtcccagccccgccgtcgtcgtcgtcgtcgccgtcgtcgtctgtcagcccctcggttaacgccggccgctgacgcacctctgtcctgccctaccctcaccgcagcgccctcgccccgctcactcggcttcgcaatatccccaatgagcaggtcccgaccgacctcgccgtcgagtactacgcccagcgagcatcgaaggacggcctcctgatctccgaggcgacatttatcgctcgaggtacgcaccgcctctctgcctcgcctccctgcgtcgtctcctccggccgaccgctatggctgaccaccatcaaaccgatccagaggccggaggctacccttacgcaccggcgctggcgaccgacgaccagctcgacgcctggaagaaggtgacggccgccgtgcacgccaaggtccgtcgtcccaccagcgctcgatcccattcacccgttagcaaacccagctgaccccccctcctttttcagggtgctcgctttttctgccagctctgggccctcggacgagccaatgccgatccgccaggtcacggccacatgcccgacgtcaagacggtcggcccctcggccggcgtaggcctcaaggagggcttcgagcccgaggagctctcactcgacgacatcaagcggtacatcgggctttacaagcaggcggcgtcgaacgcggacgtcgctggctttgacggcgtcgaagtccacggcgccaacggctgtacgtctcatctgcgctcactttgcctccctgaaggacactcatctcgctctctcacgcgcagacctcatcgaccagttcctccgcaccgactcgaacaagcggaccgacgcttacggcgcgggctcgctcgagaaccgcagccgcttcctgctcgaggccgtcggcgccgcggttgacgtcctcggccaggagcgggtcggcgtccggctttcgcgtccgtccctcccctctttcgctcttccttctctcccagcatctgacaacgcctctcactgtttcgcttcgctcgcttcagcgttcggcaccttccagacggcgggcgaggccaacccctacgtgatttttgagcacgccgtccgccggctcgtcgagagtttccccaagctcgcctacatccactttgtcgagccgcgcgaatgggcgccgggggcggccaacacggatgagctcgaggaggggctcaagtgttcgaacgaccgggtgcgcttgcggctctcacattgctgttgaaggacgactgagcggctgactccttgccgtttgtagttccgcgctatcatccgtggcgtcgacccgtcctcggtcggcgacgacgagacgtacgtctttggcgagccgacggccgagcgcccgacggtctgcatctcggccggcggcttcgaccaggacaacgttgaggcgcacgtcaagcggacgggcgacgttgtcgctatcggtcggcacttcagtgcgtcccttccttcttgtcagccgctttctttgtcgcgagctgacaccccgccctcatcctctgcgcttggacaaagtcgccaacccagacctccctcgccggatcttcgagaacctccctcttacgaaatacaaccgcgacaccttctacagcccgcatgacggcctgtcagttcttgctccctcccccctctctcctggagcttgcgggctgacgcgagatccttcttggtcggtggacacggatgcaggggtaaagccggcgtcggcgccgagggctacatcgactacccgttctacgaggaggccaaggcctaagtcgagccggatagagccgtttagaaaggagagcgggaaggctcttgtcggatcctagattgcgatcggatggacggttggacttgaccagaggccggcggcgctgcccgcacgtcggtgtccgggcatgaggacgcctttgagctcgggctcgggcgggggaaggggtggatgacaaaagctcgttttgggcttcggtgtccgggcatcaaggaaggagagagagagcgaccgctcgggcatcgagcatgcttggctggctggcacattgtgccaggccgggcgaagcgggcgcgccgtcgtgcatcagtcagcttgcgcgctttggtcagcggcggtcattcgcgctcgcccctcttgcgtaagacctttagcgaagggagccagcgtcctcgacgagaagagggaggatgtgatgtgagagagaagagatcgacggcgggcgacgggcgtgacgcgcgccgagccgcaagagtgggtcgggcgcgtaagccaatgccgtaagcagccagcgccctgggagggttgcctcgtctctctattggctgaagattctcgttcgtctcgggtgtgggcagctctccaaaaaatgtggctgctggtctgtcgacccactgcagcctgctctctcgtcaaaatgggctttctcgaaatcagaaattgtcaagggcagcggcgaagttacagcgagagtcgtcattgggcgtaaacgacggcgcgcgcgcgcggacagacggccttgctgcctctcctcctcctgccctccgccctacccctcccaacaactctctctttcgcgtccccttctcctcctcctcgactcgcccgctcttctccgatgcaagcgagccaggaccggtcggcgccctcgccaacgccatcgccgccaccgcctcaccggtcagtagcagcaacaacctcagccccgacgaccgccgcctccagctcgacaccaccaccaccgccgcagggcgccgcgactgctggccgtccgccgccgacgcagctcgcggcaggcaagccgccctccttccgtaactcgggcttcagtttgagcctcccgccgccgacgcccgctgtcggcagcggcagccagaacccctttgacctcgccgccgccggcaacagtagcggaggaggaggagggatgaccgatggccaggccttccccggcggtcaccaacagcaacaggcggccaacccctgggcgcacctgatggcgtcgtctggcgcgccgacgccggcgatcaaaggcgctttctcgccctttacgtttggcggtccgcccgacgggccctttgcgcctcctcagcctccgccagggccgagctcgtcccctaggcctccgacgacgctcgccaacggtcgccggccgccaggccaaggcgtgctctcgcccgatgtcaaggcgatgcgcgagctctcgctcaaggagggctcgcacggtgctgtaccgaacgccagcggcttcgcccagcatcatcagccgttcgcgctcggcggacttcctggaaaggccccggccggtcgaccgcctcatcagcgcgtgtcttcagcgaatagcagcagcggtcagcagcagcagcaggcagcgctcggcccgcctgcccagagctcgttcaggctctcgccgaccggtgggcttcctagtctgccgggaggccgcatcgccggcggctccgtctcgggcggcggccgtatcccctttggatctgggtcgtacgtcggctcctactcttttgctctgactatcaccgcctgctgacgtttggccccttccctttctccactcgtctgatgcaggccgaagccgacgtcagcaatgagccaggcggcgctttcggcttccagcggagcgaacgcaccggcgccggccaagcctgcgacggccctccctgcgacaggcccgtcccagatccggctcgtcccgccccagtcgctgccttcgccgctgccttcgacgtacctcctgctcgaccttcggacgcacgccctcttcacggcatcccgcctccagggcgcaatccccgtcacgatcccgtcgacgctcctccggcgaccgaacttcacgcttgccaagctgatcccgatgctcgactcggaggccgaccggtcgcgggtactcgcctttaaggaggagggcagagtcgacgccgtcattgtctacgatcaggacggctcatcggctgccgacaacggcacgctcgtcggcctgctcgccaagttccggaaggacggctttggcggcgagctctgggccgtcaagggcggctttctgagcgtcctccgccaggcgcgcgcccaggacgggccgggcggcgttcgcgcgctcgtcgatgagaagcggatcgagacgagcttcaaggcaggcgggacggtcaacggccgcgagctgccggtgcgtgcctgaaaccccgttcacgcttgcatgtggcacgcgctgacctgtcactcacttctctggccccctcggcagcttacggcgttccagtcgacctcgacggcgacgtccatcctgtcgcccgcccagctgctcgaccgatccggtccccagacgggcatgccttcgcatatgggcggcggcgcgacgtgctcgtgcccgcctggccagcacctcccgcaggcgcacgtcgcccagacgcctggcggccagtacccccctggcggcgcaggcggctgggacgcctcgtcaccgatgtcgacgtcgacggccggtcctccgacgcacggcacggctgggcccggcggcgggcttcggaccttcaccctgacgccaaacacgtcgtcgctccaggcggccaacccattcttcgacaacatccggcaaaatgtcgagctctcgcacggcggcatcactgagcgcatcccgctcgacctcccccagtcgaccgtcgcgcgcgcgcacgagctaccgtcctggctccgtgagctcgcgacgtgctccgagaaggaggcggccgagcggctcgctgcgcagttcgaggcggtcgagcggggcgagctccgtcggctccagggcgtcatgagctaccacgcgcgcttcggagggagctcgagcagtacggcgacggccggcgggagctcgagcagcacggcgacagccggcgggagtgcgagcgcgagcaacgacggcacggccgacggcaacttgagcgacggcggcggcggcggcggcgaagactacttcccctactcgatcacggccgggctcgaaaagggccagaagaaccggttccgcaacatctggccgtttgaccacgcccgggtccggctcgccgaccactgcgtcgacgatggctccgactacatcaacgcctcgttcattcagccccggacgacgcacaagcgctacatcgcgactcaaggcccgctcccgtcgacctaccgcgacttttggaccgtctgctgggagcaaaacgtccgtgtcatcgtcatgcttaccaagcagcacgagggcggccagatcaagtgcggcgactactggtccgaccggacgtttggcccgctcacgcttcatccgatcggcgtcgaaggcgccgaagaccttgaggacgagagcgacggcggtgccggcggcggcttctccttcttctcggcggccgcaccgccacccgcttcgtcgtcatcggcttcctcgcgctcgtcgtccttctcgtcctcgatcgctggggggacgccccgcccggcgctcatcaagcgttcgtttcatctctcgcatgccgaccacccggacgagcccgaacggctcgtcacacagatccaatacgtctcgtggcccgactttgacatcccagagtcgccggccgacctgctctcgctcatccaccaggtcaacgagctcaacgactccgccgcgacggaggcggccgagtcgggccgggcgccgccgggcccgaccgttgtccactgctcggccggcgtcggccggacaggttcgtacgtcgtcgtcgacgccgtactcgacgccgttaagcgccagatggccggccggcgcgagtcgcgcaaggcccggcaacggacgttctcgactgcgagcagcgttggcggcagcggggcgggcacgcctagcgccgctccgacgccggcgtcgcagggcgacatgctccgccctagcgtgctcggcggcccgccgagcgcccagtcgccccggtcacactcgggctccgtctcgcccgttcctccgccgacgccgcctcctgtccgccgggtaccctcgccgttcgatgcaggcggctcgagcccgacgcgaggcggtgggcctgagcctcgtgggcctccgctcggtcgacggccgtcaatggacatgcccgcgccggcagtcgagtcgggcatggaagttgactatgccaaggtgctcgaggacaaggcccggtcgacatcgggcttcgccaaccaggcgcgcgacgagtcggtcatgtcagactcgtcagccgacgtcaatgacgtcgttggcggccggcccaatggtcacggcggcgccgtcgccatcccgcccgcgccgtcgtcgctctactcgcgcgactcggtccacaacggctcgcagacgtcgctcggtcagtttggcgagatgaacctcgcgtcgtcgtacggcggcgactcgcgccggggctcgatcccgcacctgtatgcgtcgagcccgagcccgcacctgccgccggccttgtcgacggcggcgacgcccaaccactcgcgcgaggggagcccgacgccggctgtcctggccctgccagagtcggacgtcccgcgcaacacgcaccggcccgaggagcaagggagcccgaccgagctcgccgaactccaggcacccatttttagcatcctcgccgacatgcgccagcagcggatgagcctctgccaaacgctgcggcagtacgtctttgtctatcgcggtgagtgctcgttccgtaactctccctccgcgagcgctgccggcgctgacaacccgctgccgttcacagtcgtcttccagggcgtcctcgacattatcgacgaggagcgcaggggcgtgtcggacatgcagcacgacgacaagaagcggcagggtgagtgacttcgtcgcttgcgtcatctctggattctgacgtctcctgcccttttgcccagcctccccgaccaacatccatcagagcctgagcaagcggccgtcgattaagctgcccaagtcgcagggccggccgcgacggggctcgaccaaggccagcctcggcagcatcgcctcgcccgtctcgagcacctcgggcctgtcgggtcaggccagcctgccgctcgcctcggaccgcagcaagtctggcggcagcggcggtgtagaggccgcagagcctgcagtggctgccggccaggcggccaaagacggcgaccaggccatgacctgaccacctcccctcaccaacttagagtccccgttcacgttgtcgttcgccctgtatcccttagcactcggcccgcccaccttcacttgcatgtactgctgtcatcccgcaccctcttgccctacaaaatgcagttcgctggcaggtcttgcagcacgcgccagagagcagtcacagtcaagagatacagtagcggcccgccattccccccgctctcagagcccggtccacgtgaaggtctgctcgagcgtcgtctcgcccgtgagccggatgtcgctcgagctggcggcaatccggatgccaaagacgccccgctcggcgacccaggcctgcctcttgtcgtcgtagaaggagaaggcgtcgcggtcgagcacgagcttgaccgtctcggacttgcccggtgcgagaacggttgttttcgaaaacgccttgagctcgtgctcgggccgctggagcgacgccaccgggtccgagacgtaaagctggacgacctcgcggccgggacgggagcccgtgttagtcaccttgaccgagacgctcagcgcgccgttggccttaatgatcgatggaagggacaggtcggagtacttgaaggtcgtgtagctgcgggggggcgtgtgcaaatacagcttgtcaggcggcgggtcggcacgcaagcagtagcgctcactcacgtcaagccgtgtccaaatgcaaaggccgtcgcgaaggccgggtgccgatagccgacaaagatgccctcgttgtacggcagcttgccgttctcgcccgggaagctcgtgaaggacggcgagtcggtaaggcgacggctgcgcggattgaacggctgatgtcagcccgaggatcaagcgaaacgttcagcggaaggcaagacgaacgggaaagagatcggaagcttgccagacgggtcacgcttgccaaaaaggacgtcggcgaggccagagccgctttcgttgccgccaaagaaggcctggacgacggtcggagcccggtcgatccaaggcatggcgacgggcatgccagagttgttgacgacgatcgtctgctcgttgacggccaggacgcgctcgatgagctcgttggtcgcgccgggcaggtcaatgtgcttgcggtcgaagccctcggactcgaggtccgggttcatgccgacaacgatgatggcgactggcaggagggaggcggggtcagctgtcgggcacttgagaattgagaacagcagcgtcgagggactgactgtccgacttggaggcgagctcgaccgcctccttgattgcgtcttcgtcgctgatgaccttggaggcgccgatcctcatcgcgccccgggcggtgaagggcgccgacttgctgatcggccgctgattcgacattcgcgcctcgagattgtacgtttggccggccttgagcgcgatcgttccggtctgccagggcacaaaggaaagtgagtcagtcgatgctctcatcggtcgactgaacgattggcactcaccttctcggtcgagccgaggccgaagaatagctcgccttgctcctggtcctcagagttgttgacgacctctttgccgtcgacgtagatgttgccctggccggcgacgacaaagccgaaacgccagtcaccatcttggtcgggcgtgaaggtcgccgaccagtggatccagcacgtcatgttgacggcggccgggatattgtcgaggaacatgttgaaggaggtgccgctctcggtcgagtggatagcctcggtatcctgcttgccctcccagggcgcattgtagaagacgatccgcccgccggcaatgtaagggtcgattgagggctggtagctgtggccaggcgcgccgacggcccagctgacctcggcaccaagctcggccttggcggcgacagtgatggcctcgagcggcgagacggtccaagacggccggagggctgcgcttccgccgcccgagatgcaggcggccttgctgttgtcgccgaggacggcaatcttcttaatcagcttcttgccggccgtcagcgggaggaccgaggcgtcgtttttgaggaggacgatcgcatcggcggcggcgcgtcggacgagctgcgtcggacggcaaacagaagtttgtcagcgtgatgtagcgtcgacgctcactcgagggcagacgtacgtctcggagctcgggcgtgtcgacggcctcttctggcttgtcgaacggaatgccagactgctgggcacgctggacaatcttcaggacctggaagacagcaggggctgggtcagtctgaaatgtgggcacggaagtgcaacttgagcgacgcacattgcggacgcggacgtcgaggtcctcgaccgtgagcttctgggccgtgagcgcgcgctggagtgccggcccgcgcatcgtcgaagggccgggcatctcgagatcgagtccggcctcgatggcttcgacggtcgagtaagtaccggtccagtcgctcatgatcagtccgtcaaagccccactcctgaagggcgagacggaggcggcgaaaggggtcagaggcaagaagcgctcgccaggagctgcagtcgcaccttcatcaggacgtcctgcagcaagcgcttgccctcgctgacgtggacgccgttgacccggttgtaagcggtcatcaaagcccagggcttgccggtcttgagggcgatctgaaaaggcttgaggtaaatctcgcgcagtgctcgttcgccaatctgcgagtccatcgacatgcgctcaaactcggcatcgttgccgacgtaatgtttgatcgtcgccgcgacgccgtgctcctgaacgccctggatgtaggcggccgcgatcgtaccgttcaggtgcgggtcctccgagaaggactcgaagccacggccgccgagcggtgagcgctgcgtgttgacggtcggcgcaagcaggatgtgcgcgcccttgtgccgacactcgccggcgagcgcctcaccaatttccttggcgagctcgacgtcaaacgcgcttccgaggccggtcgagcacggaaagcaggttgagggcgtaccgttgaagactggacgggtgcgagccacaggtcagacgagtgctcgagcgcgcagtgtcgaaacaggcaagcaaagagcgcgagctcacagctgatgcctcggacgccattcggcccgtccgacatgcgaacggcaggaatgtcatgagctgggagcgggaccgtatgccagaagtctgagccggcgagaagggcgatctggtcggtcgttgggtcagctgcaagccctgctggagctcgccgggcgagatgacgctcaccttatcattgacgccgagagcttcgagggttgcctcaatgtcgagtggctcaggtatagagatcgctgcacgcaggagagagagatgtcagcacggagtcgaagcgaggggatacaagcaggaaggggcggccgcactcatggcgaaggggtgagtgacagatggaggcgagggaggtcgacgttgcgaggtgagatgatccgctgctcgaccggccttcctaaacggccttgtcttgccgtcgtcgtccgtcctgggtccgagcatcgaccgagatggcacccgagctggtcaggcgacggggcgggctcggcgaaagagagcagcgagtcggcgaaagagcggaaggcgaaaggctcagaggcagcgtgaacgaaagcgggcgggtcggacgacggcttagccctgaccgtcacgccaggcctcctaggcagatgttcggcgcggggacgccagatagcagagagtttgagcatcctttccctcgtcgtcgtcgtcaatcgagcatggcgagaggagccagccatcgtttgaaggaggcgtcggcgggctgagctgccgcgggaggcgtggccgtcggatccgaccggcctgctcctgcctcgcgaccataacctcgcccgccgccaattttcaccttcaactcttcagcctgtatggtaagcagcagtggcgcgaggaagacgctcacctacaggcggcattgctccgctggcactcgtcgaggcgataaggtggtcgcggaggcctgcaggaggtggccggccgcgactgctggagcaagcacgctctgagcaccccatcgctcgccagccgtcgtcgacctgccctcaccttcatcagcctcgacgtcgccattggccagaaggagtctagtggcatatcgattccgctcactggctgtcttgcaccccttaaaagagcagaatcgagaggtcgatgctgctcttgcttacccgacttacccctcctgcctgcctgcgaccgactcctccctcgcctgctatgccgattgctcccatggaccgaccggtcgtgccgatcgtcctccagacccccacctccccagtcacctcgtcttcctcggcctcgtccatcgacgagaagaagctcgaccgggccttcgtcacggtcgaggggatcccgcccctagccgaccgagctgccctcgacagcgacaacagcttcaccaaccatctcctcctcttcttccggatccgcaagcgcagggcctttgatggcctcgacgaggtcgccacccagccctccgtctttgacaccgagcaggccgacttttaccggccgatcgccacctgggagaacatcaaggcattcgacccgctcttccgctggacatggcgggaggagagggccgccgtccggcaggtcgacctcaagctcttctcggccatcatcctgctctttgccgcgctcgacattgaccgcggcaacattgcggctgcgacggccgacaacctgctcggcgaccttggcctcacccaggccgactacaacctcggcaacacgctcagtaaagtcggcttcctcttggccgagctgccctcgcaggttttgtcaaagcgaatcggacccgatatttggcttccgtcccaggtgtgcatcttcagtatcttgtctggcgcccaattcttcctcaacggacgggcctcgttcctcgccttccgcttcctcatcgccgttttccaagtgcgtccagcctccccgcttgcgaaacacttttgagcctcctcacccgagtactgaatagctttctcctgcgttatgcacagggtggcttcatcccggactgcatctcgtacctgagctacttctacacgggccgcgaactcccaatcaggtaagccccacctcaccccatcggctcgcctcgctctcgccctgacctcgccctctctctcccgttatctctcgtcatcaggatggccatcttctacctcaccaacgtgagatcgttcggctcttgacttccatgactccgaagctgacgcgtctctcccgtcctccgccagtactgggcaggtgagctggcccgcctttcgtctcggccccctgccgatgctgacttaatcctcgttcctttgcagacactcttacggccttcctcggcgtcggtctcaacctgatgcgcggtgtcagcggtcgcgcgggttggcgctggatgtgtgagtttgcgctttagaggagcctacttgctgcacgtcacgtactgaccccttttcgaccgccgccgcccttaccttcagtcctgatcgaaggcatccgtgcgttccgacacgaagacgtcttgatgaggctatgctgacattgaacctcgtgctggctttccagtcaccctggggatcggtatcgccggcttctggctcctcgttcccgcgccgaccaagacgtctcatctgacggagcaccaggcaaagatcatcgtcaaccgggccgttcgcgacgaccctggaaaggtacttctgtttgctgagtgagagcagactcaggtgggcccgtcgactgacctcccttttctcggcgcagggcggcatgcacaaccggcagggactgacggtccaaatgatctggaagtcgatctgcgactacgatctctggccgctctactttatcggcatcacgtacgtctctcctgcttcggtccgacttcaaggcatcgtctgacacgtcggtcctcgctcgtgctctccagcttcggcctcgccgccgtcccgatcaagacctacctccaactgagcttccggggactcggcttctcgaccttaatggccaacctcctgacagttccctcgacagtcatttctctcttttcgctcatggctatcagcatcctctcggaggccgtcaacaaccggagctttgtctgcatggccgaaaacatctggctcttcccgtgcctcgtcgcgctcgtcgccctgccgaccatcggaccctggcaatactttgcggtcgctaccgtcgccctttcgttcccttacgtccatgccatccaagtcggtcccgaccgagcaaacgagactgtcgagcttctcgagctgaccgagccctccctggctctcaggtcgcctggtgctcgaccttgtccggcagcgtacgcacacgcacggtcgccgcgtcactctacaacatgagcgtccaactctcgtccatcatcggcgccaacgtttatcagaagtcggacgcccctcgctacaccaaggccaactgcgccctcctcggagtcatcgccttcaatctggtgcgtctgtgtgcagctcgtcccgtccctgaacgttcactgacgagtttcgctgctcttccttgcaggccgtcgtctatcccgggacatacttctactttggctggcgaaatgctagtaaggcaaaggcctatgatcgtctaacgtcagccgaaaagtcggcctacctagccgccacgcagagccaggatctcggcaacaagtcgctcgactttcgattcgtccgttgaccggctcgcgcctgctgccttcttggatgcctgtttcttggtcgagacgtggcgtagccgctgggacgaggcgcgcaaagcgcgaggggaggtaatggggggagagattggctgcgccggcggggggaagtttcgcaggagggaacggccatctcgactaaccgagcttgatctgccggtaggctaccggtggtagaaatttgctgtcggccgagctgtcgacagtgaaggagcgaatggagagtgcagggcggccgggggagaggttggaggcccttgtcccgccgccaccccgctccagctccccgtgctgtcgccgacatgcgccttcccctcggccgcctcgcctgggttctggcctctgtctcttctgccatcgctcaggagcaaacgacgacagtaccctcgtcgatgagcgaaagcccctctcgctcagcggcttcggcttcggcatcggcgaccgccccgatgccgagctccctcttgccgagcgccgccgcctcgctctcgtcggtttcctcagtctcctctctctcacttcgcgccaatgcgacgtcctcctcatctgctccacttgcctcgccatctctcatggcgaacgggacgacgcttgagatcgacggcagcctgctgtacccaaatggctcgcggacgctcactaacggcacgctcgtcgagccaaacgtgaccgtctcgtccgtcttgccgtacgagatcaagctcgacggcgcgtatggcgtcctcggcagcgtgctgatcgtcaccggagcgcccgtttgcatcctcggcggcaagaaccgctggtgagttgcccgctcgtgcggtgttgctgtgtcgcgtgcgcgccgcgcagtcgctcagcgtgaagtcgcagcggcacagcgagactcgaagactgacccgcctcgccctcctctgcaggacttcgctcttcttgctctacttttacgcgggagcctttctcactcttgtcctcgctgtccatttcggcgtctctgtcccggaaaacccgccctcggcgacgatgcgcggcgtctttatcctcgtcggcgccgtcgtcggtggccttgccgggtcggttgcgatccttatcgctggctgggcgcgcttcggcctcacgttcattggcggctggagcgtcgcctggtggatactctcgttcggccagggcgggctgatcaacgcgctctggggccgctgggtgcttttcgccggtgcgtctcgtcccttagcaacgacgtattccaacctccctctctgacgccacttccttgacaggcctctcgaccgtcgtctttgttcttggtctacaccctcggacgcacaatcccctcaccgtcctctcgacctcattcgtcggcgcgaccgcctttatcctcggcattgactgctttacccgggccggccttaaggagctctacgtctggaacctgggctttcgatcgatatttgacgtcgtcctcaagccacatggcggccgattccggctcggcgacgtcggcatcgtcgagattgcgctcatcggcatcctctgggtcatcgggtgcggccgccgtctctctcccttggccatcaactgtcgctaacccttgccttctcttccaacagctttgcgatccagttcaaggtttgggatcacctgctccggccactacccgccctctcacggacagagcgccgggcgcggcgcgagagtcgggcgctcgacgccgagcggcgcgtcacccggcacgacgacgagctcaacgcctgggagacggcgcacggcaagggcccacgcgatcttgacggtcgtggatgggcggagaagggtcttgacagtccaagtgggtcgaacgccgtcctcaagcggaccgactcgggctggggctcggcttcaggatcgaccagcgcgctgcaagatggtgtcgctgtccctgtgctcggccagaagtcgagcgccagtcgccacgcggcgcttgaagccgatcggcaggagctcgatcagaaggagaagctgctgggcgagatccaggtgcgtgcttcgagtggctgtagtcttgccctaaaaccaccctcgctgactcgttattcgcacagaccatccgacgcagcattgatgcactgcgctctgcctcgcccggcttgatagctccggtatcgcctcgactggcagctcacggtctgccgtcctcggctttcaccgccagcagcagcgcctcgcaggcgccgaccgctacgccggcgcccgtcttgtaccagccgctccctgccctctcggaactcggtcgctcggttcccatgcagccctcggcctcgtcacgtccgggcccggccagcgactgggaccggtatcttgagaagcggcaaattgtccagtcgtcgccttcgtcgccggcagcgctcgacgagtttggccggagcgaccgcccatgggcctcgtcgcagtcgcagcgtggccacggcgaccgttctacacgcgacctacccatcccgcctctcgcagtctccggctcctctgctggtcgtccaagtcacgcccgacagccgtcgtcgacgacgctcggtcccgcagtgtcgggtgccgccccgccaagctcgccaccgaagcggcacgctcccactcgctcgctctcgcgcgacgaactcgccgaccgccactcgcagctcctgcgcaagatgcaatcctcggcgaccgactcgctcgaggccgatcgcgcgcgggaggagtggcatgctcggcaactggttgagcgcgacgaggaggctcgcaagcgtgagtcgatggcggctctgctcgccgagggccagacgggctcccggcgcaagagcggcgccgtcgacgtcgacggctggcggagtagcatcgctgtcgacgatgcgcgtgtccggccgccaatgggcggaccatcagtagcaggacgatccggctccttgtccgccggtcgacgctagactcttgcccctctcacactgtaccgatttggactcctgcacgccgtcgtcttgccccttatagattcccccttctgtcatgcccagcgagcgcttgtacaacggactcgttttcgtttgatacattttgttgcgttcgaggaaggggaaggagagagctggtcgctggggtaggcgggagcgggcggtgtatagcaagagggaggatgctcgcaggtcgcgaatcgcacaggggcacaagagaggcagaggaagaccggggggtgatagagggaagggagcatgcagtgggagagaaggggaaagtagagatgtcggcgcgcttccagccctatggccggccgaggcccgagttgccgttgcggaggagcgacatgaggtcctgatggggcggcccgccaaatccgccggctgggtagccgccgtaggggctctgctgttgctgctgctgctgctgcggaggcggaggcggcggctggcctatgccgccgagacccgggtagccaccctgaaggtgctgctgctgctggcggagcgagtcgatgtactgctgctggcgcgagttggccatctgcgatgggtcgaggtacgactgctgctgctgctggggctgctgctgcttgaccggcggaggaagtgcgccctgctgtgaggccaggagctggtcgagataccgctcctgccggccctgaggcgggggcggcgggggcggcggccccatcggagggaagccgccgttcgaaaggccaccagccggtccacgcgcgccgttcggaccgtttggaggtgcgccaccgccgccgcccatcatcatctgccggagcaggtggttctggatctcggctgcgttcggcggggggaggctgccttgcggtggcggcgagatcgactggccgccgcggtagacgttctgctgctgttgctgctgctgagggggcgccatgcgttgaccgccgccgccgctgccgatctgttggagctgacgcaactggtcgaccgagtagccaccgctgccgctgacgagaggagagttcgagttggcagtccgctgctgctgggcctgggcgtcgagtaggacctggaggtgatcacgctcatgccggcgcggaggctcggctgacggcggtgccggatgatcgtagagggtgcgctcgccacccatgccaggcgggtagtgcgacgcgcgaccggccgtggtctgctgctgctgctggtgcacatgggcgggcgaggcaggccggctccgctgctgctgctgctgctgatgttgcagttgcggggggatgccagcaggcggacgtccaccgagggacagggccgagaggtcgaggtgagcctgaggctgtggcagcggcatctgcgagcgcgtgtgcgagggctctggcgcctgcgacagcatgacgagatgtcagcgatccaccgcaagcgagcggcgagagggtcggtaggtcggacttacgtgcgagctctgcagcatcgccagcagcttgttcatctggttgttctcgtcgcccgtccgctgctgctgagggtgctgctgcggtggaggaggaggagggccgccaccgcctgagaggatgctcatcaggttgcctacctgcgggcttgcctgaccgcccatcgggggcgacgccatttgctggcccggaggaggtgccggcgccgcctttttctgctcttcggtgaagaacttggcgaagcgcgagccacctggagcacgcttctggccgccaggggcaccgccagcgatcgaggccgacgcgatgctgggtgaggcagccggcgatgagaggattgccgggtcgcggaacagaccgctgccaggggcgatggtcgaaccggcggcgttgggcggcggaaggagcggagccgagttggccgtcataggcggaggccgagtcagatggtcaaacatgctggccgagacaggcttcgtagggtcggcgaccgttgcagcaggcgtcgtggccgagcttgcgggctcttgaagcggcgcgacgagcccgtcgcgctcgcgcatctcgcgtttgaaacgcatgatggcgtcctcgccgtcgcgcttgtccgagtcgccagtaggggtagaagccgcgccagatttctcgtcccgcttccgaccaccgccgccggcgccgccaaacgtgtcggtatcatcgcccgtgcgcgtccggcccctgcggctgccgcccttctcgagcgcgtccgagcccgagtcagcccgcatccacgccggcgtctcgtcatcatcttcgccacctcgccggcgccggtcacggtcaccccgatcgttgcggtcgccacgctcgcgcgcaggccggtcgtcgagcgaaccgacggcaggcgccgggttccaggccggccggccgggtgcagtgcggccgctgccgccctcgcgcaagccgttcgacgaggtcgaggcaagtaccgatgaggacgagctgccgctcggtagcgtaggcttcgaaggcaggccagcagctgcgggggcaggatgatgaacgtcagcgaggcatgccggtcagacagtccggcgagtagacgcacctctcgaccgccagtcgcccttgccccagttcgagtcgtcccggtcgcggtccctaccggacggtgcgctctccttctctgcgtcccgatcggcgtccttcgtcgcgtcggacgcacggacgccccacgacttgggcacgcgctcgccccggtcaaagctctcggccatctggcggagagggggagggtcacgcgtcagcgcggtgctcgagaggtcgacagctgacgaggctgctcggccgcacctttctcaatccgcccttctcttcgccctcgtcgcgcgcaaggcctcgctcgccgcgcttctcgccccgggtcgacgagtgcctgaaggcgcccatcccgcctgagcttccgatagcagcagcagccgctccggccttctcagttccgcctcccgagtgatgcggtggccggtcacgttcccggtcccggccagaggcgccggcggtcgaggatgagccctcgccgccggcgccgttccgagaggagcgagcgcgagatgctggcggcgagttgggcgacgggcgtgattgcggcggcgaaggaggaggaaggtctctgcagacggtcacgagcaaaggaaaggtcagtgattgggcttcagaagtgtcggcttcccagctgggcagcggatggaagcaacagctcccaggcaaggtaagatggacggcaggcgtcaggagggcaaaagttgaagagccggcagataaccgctcaacccgggaaaccctacaagtcccggccagagcttgatcgcccagctggccgtctctgtcttaagggcagctcaattgagcgaaacgaatgccagcggctgccgagtaaggtcgtcggtcgacgtctcgagctcgaggtcgaactaggcgagctgcctgcgcacccctctcggtcgcctcgaggcaaccttgcgagctcccaagcccagcaggacgcgatggccttcccatggccgacgccagcagagctgcgagtgacccgacagaggaagagactgacccaaaccattccttgaagcgaggcatgcggacgcctccttcgctcggcggcgacaggacgagctggccggcctttgcgaccttgggcgagcgcgagagccggaggagctgcggtcgcgagtagcggatggcatcgtcgcccgatggcgctgagctggacgaggccggcatggagtgggtacagagagagcggaacgagtcggatggcgaggatggaggtaaggagaggagagaaagggcaagctcgtgcggcgggggttttctcgcggcggcggtcggtccgcgcaggccacacacagacaggcatgcccatgaggcgttgcgacctctttcgaccgtcgaccacgatgagcttgcttagacgcttacggctgacgagcagctgtgcagagacagcctatacctgacatccatgctgaccctcgcaagtgttgggacggttgacgaggcctcgcgtggggacgcgccggtctggcaagggcgcgcgcgcgacgtctgcgtgtggcgagacgcctggatcggcaagggaagccgcctgtcggacggcaacgtcgacgaccaagggctgatgcaggcaaagcggcttccaatagacgcaggacgccggccgagctatcggtcgtgcgccggtcgctctgagcgctctttccgagtctgctctctgttagtagacgcatggatcgccagaggaggaagggaggcctgtcgagcggcgacggcgacaatcaagggctgtagaacatggaggcgaagcgttgccagtaagttcggtctccggcgcccttctcgccgtcgcgggcgacatcggccgtcggccggccctggaggtcgcggtcgtcgtaggcgttctgccggtcgtcgagctacatgaagggcaaactcgctgtcagcgtcggtcgcatacggatgcaagaaggggccgacacagacgtaaaagtttgactggaagcaggcggcaaaaatcgccacgaacgacaagcagagagcggccgtccacatggggtacacagtcctatgtcgaagggagagggatgcagatcagcgacggtcggcgggtggggtacatctgaaggaagacgtacttctcgtaggcctggatggccgcctgacggatctcagagtcgatcgggtagtctcggatagcggtgactggacgatggagtttagtagagcaacctcgtcgacggagagtcaagaatcgggcacgcactgtcgccgaaaaaggtctggaccatcgtgtcgttgaccgacagaggcatgaactggcgcaggttgttgggcatctgattggccgcgcaaaaggaggtatcagccggccggccggctcgacacagaggggccaggcggaaggttgactcgccgtgttggcccacatggccgaggcagcggccgagccgatagaggcaccgacgctcgaccagaggatgaggagcgcgatggagagggcgacgtcctggtgcgggactgttgcggaggggtaaggcgatggtcagcctcgaacgccgctcgtagcgcagcccagctagcagacggagactgaccgcatgcctgggccgagacctggttacccctgcgaagaagcgtggttgacgggtcaacgacggccaaagggacagtagaaggatagattagcagctcacatgaccgaggcagcgccgccaaagccctgtcaggattgagaccataggagggcgtcagctgcggaagagtcgaagagagcagtcaaacggacgcacgatgaggacctgcgagataacgagccgggccgtgtcgcgcactcctcccttgtcgatacagatgccgtagccaatggccttgaggcacagaccagctaactgcatgcctgtcgtgcgggaggggaggttgatggtgagcggcgagaagggaaagagagaagcctcggaggcgacgcacccttgtagcgatgggtgaagcgcatcagcagaccaaaggcaacgccgccaatgcaaagcgcgatcgagagcgtgttgttgtagtctgaaaggtaggtgagaaaggtcagaacaatgtccggaatgatcgagagagaaacagaaaagcgcacagttgaggttcctggtcgagcgagactcagcggcagatcgtcagcaagcaccctagtcgcggcccgcgaagcgacgcgccaggactcactcctccgactgttgtagggaggcagacggcagggaagggatccaggtgataaggaagggggtcaacgaatcagtcaaagggaagagaaggcacgcaacggcaaggggcgaggaacggcagagaaagaagaggagtaggtgagacgcacccaatcgttcacgatactagcgtagctgggaaggtacaacagctggaggtagccagcaatcatgtacaccctatagagaacggaggagggtgggaagtcaagggtcagcgctgagagaggcggcctcttgcgctggcgactcacatgttgatgatgacggcctgggaggagaggcagagagcgtcagctacagcggtgagtcgtagcggaagcgccagccaaacggaccgtcatgaacgtcttgttgagcaaaagacgcttcggcgacgaaggaaacttggcccacttgacctcgaagatgccgtatgcgacgaggcagatgccgccgacggcaaacattgcgatcagactcttgttagagtagccgccgtcggcgagggacgagagcgagaagggtaggagcagctgggggagggcaagcgacagattagtcgccgtcaggcatcggaggggctagactctggaagactgaccagcgaccagccgaaaccgagcaagatgaggccaaacgtgtcgagctcgtggaagatctggacggcccgctggacgagcggagtcttggggccttgcttcttctcggcgagaccgtcgacgagaccctggacaatggcgcggtggtcgagccagaggaggacggcgatcgcgggcgccatgacgacggggaggatgatctgcagaccgtcgtcgggtcgaggtcagctcgggcggacaacaatccacaaagcagagaaataaggcgcaccgcgtacatgccgtctggagattcgtcaagacggccggtcagcaaggggcagatattgagcaggtcaggcaagggagactcacagccccagcgccagttgtagtcattggcgagtgactggacgatcttgcctgtgaagaagggcgtgtagatgtagtgggcagcgagcataccctgcgcaaacgcgcgccactgcagacgatggcgaacagggtcagctcaggccaggaggcccgcatccgagacggccggcgcaccttgagcgagatgaggtcggccgtaagaatggttgtgacgaggctgagggcggtcgagccgatctgaacgatcacgtttccgacgatatagcatgccagcgtgggtgacttagttcagagggaggagtagcgaatgttagtcgcgaggctgtgtcctgcgccgtagcctaagccttgactaaccttgagaatcatgacgaagccaattgcatagcagacgaccgaaatgaggtacattggaggccggccgctaacgtcgcagagcttggcgatgactgtgaggcgtgagagagagaggaaacttcagaggctggccgacaagaagagaagcgcaactggtgcgatgtacaagggttcgcgacggcgccgatgatcgaggtcgcgacctggaggatgccgaggccggacgagtgcgaggcgaacgaggacgtcgcccagattgaatagttgtaggtggtcgaggactgcatcgtcgagaccaaggtcatgctgaagtggccgcacggagggagggagaatgagggagggaggatgagggagggagagagagagggggggagagagagaaagggaaaagagagaacagaggggcagcgtcagtcgtggtccgactcagcagagttcaagagccggcacgtacatccagatgagcgctgccgtcaggtagagcgagttgcggcccgtccggctctcaccagcccgagcgatcgcttcgacgcgcaggacgcctgctgagcggtatgcgcctttgtctggctcgcccgggtggccgtcgagagtcgccggagcttcaggctgatggccgccgtcgaccgaatgcttctcttcatcgatctggttcgctggagttgtcgacattgaaggagcggagggaggggtgagcgtgagaagggagaggggaaggacaagggcagccgtgaaaggctttatctagtcagacaacgggaaaaaaaaaccgggatcggtaggccccggccaagccccgacggtgcagagcatctgcggccgagcgtggacggcttgcaaccgggcagtcgaggtcggtcgtgcgccggtcgctccgagcggtccttccggctctggttgtttctaacggccgaacctccggcgggtccgaagcttgcggccattccgtcgcgaagggttcgagtgaggtgcccctctcctgccacgggcgggggaggcaggcacatgagctcgccgcagcctcggagggagctcgtccagcccggccgacctgtggcaggcagctcgagcgccattagttgcgagcggccagtccctagtagcctgcctgattagcgcatgagcctactggatcagtcgaggagatgttgtcgaggggcagaaggcggcaggtcatggtcagccgatcaacgctgagagaaggagctcgggcagcgcaaccaccgacgtcgacctccgccagagacctctgccccgcctcctccctttacttcgcctgacggacgaacctgtagcaggtacgttgaccagcaggcgctctgcccgtgcttgaccaacttggctgacctgcttgcggcggctctcgatccgggctcgcagctttagcaactcccatttgcgacctccatcgaagcttccgctctgcttgaccatcgggactcgtctcgactgccgcaacaggtcagtcttcagctcgggtcgagcacgcatggccaggggctgatgccgagccggccgactcgttccgattctgcagctctccggtcaacctcgctccagccagcacgatccctcgacctctcgacgccacctgctccggcaacccccagtttcgcctcgcctcagcagctccgcagctcgcaggatgccagcccgtaccgcccgcccggctctctcgctccagcactttctcgctctcacacgcctccagtcggcctaccgctcgctgctgcgctcgacgcgcctcctcccaaccctctctgcccggcgcgaagccgttgccttctaccggcccgacttcgcgctcaaacccgactcccgagcgggcagcaacgtgctgcccggcaaggaccgcgtccagtcgcacctaggtgcagtcaaccgggcggtcaagaacgtcccctggggcgcccaggctcgaggcgggcaggtcggccggtgggaggccctcggctcgggcaaggctcgcgacggctggccgaggacggtcgctccgaggcagaagctgtcgcactctggcgcgactgccggtaagccttgaagggcagcagcgggctccttcacgctcggttgcgctcagacaatcctccgccggcaggaaagcggcttgacgctaccgcactggtcgccgcccggcgcgccccccttcgcccacatcgcaagactcgccatcacccctccaaggcctgtcgctcaagagtgcgctgctctgtcgcagacgacgcactgcagaccgctcaaggcacacttctaccagccctctcgcacccgagtcttcgcgacggcctcgtcatctagtgcgaagcacaaccctcgttctacagatctatggtactgtccttctttctcaaaccgcgccactctagatcttccctctcgcagctggcggcgacgccggcaacctcggtggtctgctaaatgacccaccgacgacgcgcgtgttgcgccgggggacgccgaccgtcactcggccgacgtcgcgcgtgacggcgtcgacgtccggcgctgctgccgctagcggggcttgggggctttcggcgggtagggcgggaggtgcggctggccgagctggctcggcggcgtgaaagggtgacgcgtgttgatgaccgcgtgtcagaggctgaccattcggatcgagggcgtcgtccttcgccggccgacgcacgtccgtatccgagcgaccggcccgctcgacctcccatcccgccgagtcgagcactgcccccgtgacgggcccaaagtcgagtgcgagcgccgagagcgtctgccttgttggctccggcagcgtgtaatcgatcgaccactcgccttcgagccccgccgcccccgccgccgtcgtcgtccactcgttaacgccaaaatcgaagctctccctccgcttgccgccgtcatcgtccgccgggtcgagcaggaaaggcgagatggtcgtcgacccgccgccctctccgccatcgtcgtcgagcaaacaccacatcgccgcaaggccgtgcgggtcgaccggcccgaggccagccgtcgcgaggagcgcggcgtcgtaccatgtcggaaggggcgcaggcagggcggcgcagtgtagcgcatcgtcgttgtgaggccagctctcatgaacagaagcggtcggcagcggcgcctgctcgtagtactggtgtcggacgagctcggccggcccgacgccgacgccgcacgacgtcgtcgtcgtcgtcgaccgctgacgaaagccttggtcgtcgtcgccctcgatcggattcggccacggcccgctcgtatactcatactcggcataccggacgctcccgtcctcgtcgctctccgacgaaaacgagtagtacgccggcgcctggcgggcggcaagatggctcgcataggtcggggcgggcgtcgggtgtgagtcgaacgagtcggccgtgagcgcgggggagacgaaggtcgtcggcgggcccggatcggggacggcgaccgtctgcaataggttggcggtagtcagtttgcctgccgttaaatcgaaatgcgaagaagaacgcacctggtaacacgattgctgccagtgaccggaccccgtctcctcgtgcgccgccagacccctcaccggcccctctccagccggccagatgcccagcccaacatcctcggcccctccgctagcaaacgtggcagcagcagcccacgccgtcggctgctggtagccgtaccatccttcgagcggggcgtcggccggcggcgggatcgcccatgagatgttgacgcctgctgctgcggccgacgaggatcccagcggggggttggtcgagtaagagtgaggccggtcggtatacggcgtcgcatagccagtcgacgaggaagggtcgtacgtctgcgtcgaaacggccgacgctgccccgctcgagtgctttttccgccgcttcacctttgaacgcttctcgctccggatcggaccaggtagggccgagcgctcgccagcgccatcatgcagcgcgtaagggtgcgcgaaagggggcgacgggggtgcagtcttggtccggagccggctcatcgttgtcgaatggctctcgggtgccgactggcgacgggtacgcgagcggagaggcgctttggcacttgaagggccgacggtactggaagatgaggtcgacgccgtgaaagcggcagtgaccgacttgcgaggctggaacttgtagttgggaaagagttgggcgtgctgctcggatcggaagacaagtcggcggtttagtcgcccgtcgatagaaggaggagaaagcaaagggcccaagaccgacctcggccttcctcagctcgctcagtcgctcaaacccctccctaacctccctcgactccaacgaccacatcagcccaatcagcttgctggccttgctctgcgccttcggcatcccctccccgccctctcccaactcgccccagcgcggatgcgccttcacccgctcaggaacgacgaactccctcccttcggctttggcgcgcgagatgtgccggagcgtgtcggaccggtacaggatccagctgttgggcgggcgtttcgtatgggttggagaacgggcggccgagtggggctttttggaggggtcggagagggcattgacggggaggacgtcggctaggttataggggacggcgggctgcggcggcggcagcgggtcgaaagaggggctgctgctggaggaggttggtgctgagcgggcggtcgagaggtgaggccggtcgggaggtgcgagggagaggggcgaaggcggcggtcgagctcggcgttggtgaggcatcgtgccaaagtcgaccgccgaatggagaacagcggaaggcggtgaaggaagtcggccggagagataacggtgatgaggacggcctgcacaggagcggcacggaagagctcttgggtcgtggctaaggcgatggacgacgttggtcggtcgagtcgttgctggcctgctcgacgtcagaagggcgagggctgtcaggcggtcgctgcaagccgaagcaaaagcgcaaccacgcacgcacgcacggggtccctcccttcctgtcgctctcccgtttgagccggccgtcagccaaccgagttggcgcgtgaagggtcggaggggcgagaggggggaacgactgcgcgcgcagctggacaaaggggggcggaaggcggcgagcgggcggggcttgggcgacctgcagctcgtcggtctgcttgggctggcggagcggcgctggtggatgtcaaggcggagaaggttgaggtcgacatggcacgagctgctctcgtcagaagaggaagggtatcggctcaactaagcccgacgacaggagcgacgcgacctgctcgctcgcccgcccgccgctcagcccacgcccgcccgacacgacgcccttgtccgtcctcgccggccggccgggtaggcatcgaccgagcaggctgatcaaagggcttcgtctcagagatcgccgactgtgcagacgtttcttaacagtcgcacccgggacgtcgctcccgcatcaaagggagtcggcgcaagagggaccaagcaagccctcgctggacgcggcgccggcgtgggacgtcaccctttcacgaaaccgcccttcgaagcttattccctcgcacgacttccgagcggagagggcttggaatctcaggctcgcccgtcttagcggagagacgaaaggccggctgacgtcgggccgacgtgctgctgctgttgctgctgctgcgcggtctgagatagggagcgacgatccccttagcgagtcacgaccgcgacaggcgactctcgtctgcactgtgtctgagcgtcagccagaagatcggacgagagtggcaggggaatcgtccgatgtaaagcgagctcggaaggggaagccgagacggcgtcgctggttgcgtgacagcgagcgggcggccaccgcagtaggcgagcacggcagccaacaggccagcctcgacctccagccgtgcgagcatcgtcgtatagcctgctggatcgacctcgactattaggctcgtcgctgatggtaggatcagtcgagaggcgctcaggagaggcatggtgttcgaccgctcgacgcgaccgggcgcgcaaggggcagtgtcttcggccgctaagagccggaggaggacccagcgatggcttctgacacgggcgatcgtgtagtgcgacgagggccacctcaaggcctgcagtccgtttacggtcaacagaggttcaagaccaagaggttagccagcctgctcggaggaagaggacgagcgagagcaagggggtccggcttgggcgggccgacgctcgtgcgcgcgccgttgcgtgctggccgccgtccgtcttttcggccgaccagccgtcgagccttcactcttcaatcaccaaccctcaacagaaagagacgatgaaggtcacccagaagctcgcccaggcccagcaagaggaccggacctggtggtcgtttgaattcttcccgccgaggaccgcccagggcctccaggtgcgtccagtctctcctcctgcgcggccgtcgtccgactttcgagctcgggcggtcgtcgttcgctcgctggaatcggatcactgactcctttgctgctgcctcgctgcgagcagaacctctatgatcggatcgaacgcgttcgtcctacttctgctcctaggcatcggacgatctcgcccgggcgtccgtcggaaagctaggctgacggacttcccccccttgttctccgatcgccgcaactccgccttcctcgccttctgcctccttgcctgcctgctcttgacggcgacagatgaaggatctcggtcctgaattcgtcgacatcacatggtgcgtcgtttgcgcgcgctcgatctcgcccaggtgtttgggccttcgatctcaccctcccctctcccgcccgacctgcccgcccgcgccctcaggaacgccggcggccgctcctccgacctgacgacgtcgcttgtcgaagtctgccagcgtgacctcggcgtcgacaccgtcatgcacctgacgtgtgtcgagaaggacaagctcgacgacgcgctcgccaaggccaaagccggcggctgccagaacatcctcgcgcttcggggcgatccgcctctggggtcgtcgacgtgggagccggtcccgacaggcttctcgaccgcggccgagctcgtccgctacatccgggctgagtacggcgattacttttgcatctcggttgcgggcttcccggcgggccacccagagacgagcgccgacaccggcggcgaggcgcaggagctcgcttggcttaaggaaaaggtcgaggccggcgccgactttatctttacccagatgttctacgacgtcgacctttttgtcggctgggtccgcaaggtccgggccgcaggcatcaccgtcccgatcgtccctggcattatgccgatccagtcgtacgcgaccttctcgaaatgggttgcgcgcgagaacatcatcgtgcccgagcacttctacgccgcgctcgagccggtcaaggacgacgactcgctcgtccggtcggttgggacgaagctcgtcggcgacatgtgcaaggcgatcctcgcggccgacgtcggcatcaccggcttgcacatctacacgcttaaccttgccgttggcgcgcgcatgttactcgaggaggtcgggctcgttgcaaaggcagagcaggtcaacccgctgccatggacgccgagcttgacgcccgccaggcggaacgagagcatccggccgatcgtgcgtccatcctctctttctctctttctcgcctcgcccggctgctctctggctgacatgcgccggcctctgctctcgtcccgggcagttctgggccaaccggcagcactcgtacctctcgcgcagtccgttccccccttccctccttctcattttacccctttcccctccatcgtctaaccccttcatccctctccgccgcgcagctgaaaactgggacgagtttcccaacggccgctggggcgactcgcgctcgcccgcctacggcgagttccacggctacctcctcccgcagatcaaggacaaggacgccgcgctctggggcaagccagagacgataagagacgtctgcgacttgttccggcggttctgcctgaacgacctggtgcgctcgccttcagttccctccttccctcatccggcttctctgcctgctgacccttgccctctcggcctgctcggacgtagccgagcttgccttggtccgacgcgcccccgtcgcgcgagacgtccgtcatcaaccagcagctcgcaaagctcaacgccgccggcttccttaccatcaactcgcagcccgcgtgcgtccccggcctccgtctgtcgccctcctgctggccttcgctgaagcgcctttcttcgcccgcttgttcgctcgccccttcccacccttcgccccttcgccctctgattgggggcgtgaagaggggcggagggcgtagcaggcgggcagggtcgaggaggaccaagaagggagaggaaaagggggggcgaagggtccgttttgaaaggaagagcagcgacgcgagaagcgtgcacggcctgacgagccgctgctcgctcgcactgagccgaacgagtgagggtcgggtcgggcaggaggggggagcagaggcaagacccctcagggagacgggagaccgggatgagatgtacagggccagatcgacgatcgagggctagcgaggaggggttgtgagctggcgagaccaaggagcgggtgatagcggggcggcccaggtcggccggatgaggccggcgatggccgttagagatttcagagacataagaaaggcctcaagccggaggcggctcgtgcgactcgtcaaccatccacgacgagaagtcaaactgtaggagggcgggcgagggcgccgtcagtcgatgcaagcaaagacccagcgaggcacgcgcaggactcacgtcggtcccgagctcggcatcgaggtcgagcatcgcgtcgcccgacgtgttcgcaaacatggccatgagcgacgggtcgttcatgtcgaccgaggcaaacggatagtcgccaccgccgccgtcgccgccggcctgcgtgaagaggctggcgtcgagtaggttgctgccgttggctcctcctgcagcaggcaccggcggttgctgctgctgctgctgcatctggtcgggctgcggcgggggctgcatctggcgctgcatcatcacctgctgctgctgctgctgctgctgctgctgatgttgctgctcggccggatgctgctgaatctgctcgtgcatcgggggcggcgcgagctgctgctggagctgcacctgctgctgcatctggtgagctccttggtcctgcagatactgcgggcctgcttgcggcgtcggtgccgcagatggcggcggaagcggcgagccgacgacgccggccggcgagggctgcatcgccgggtgcggcgacgaggtgttggccggtgtcgaggccgtttgagtgacctggggcgagtcgtggtttgacgtcgacggtggcggcgcgggaggcgcgggcgacggaggagccggtgatgtcggaggcttgggctgtgggcgagcgatgaggcaatgtcagccatcttgctcggcgaaacagaaaagaggcaagcagggatgcgaacctttgccttggacttcttgggcgccgctttggccttcgttttggctgccggggccgccttgctggggaccttggcgaccgagggcgacgcagcctcgaaggcggtcggatgcatgcgaggcgtcgccgcatagtcgctgtggtgatcggtcaccgactcggtccgggcaattatgggcggcccaccagcctggggcgtgtaggccgaatggtagctcatctgcgagggcggccgcgacatgtcgtactgcgacggatgcggctggccggccggcgactgggcgtagcctggcggagccgggggcagcatctgaggcgggccgcccggcgactggccgttttgcgctgctgcagcctgctgctgctgctgtgacatgcgacgctgcatcatggcggcgctgcgggttcgaaacgaaaggtcagctcgggcccaacgagcaccgacgagcatgcgtaggggaagctgacgcactagtgagcgcgactctgctggtcgccgtactcctcgccgtacggcccggggtgctggccgttgggctgcggctgtgcgggtcgaaacgatgcagcgtcagcgcaagtccttaaggcaagacggaaaggggcgagacccaccggtatgccaggtgcgcggccggcctggacctgccgcaaagcgagctgctgctgctgctgaaggctcagctttggaacggccccgccaggaggtgggacgggcgtgccctccatcttgacgcgcttcgggctcggctcgcccgcctcgcccgagagctggacagacagctgggcctggagtccgtcggcgaggctagcgagggcaggcagtggcgcccgcgtcatctcctggatccgatcgggcgggtagccgagctgcactgagaggtcctcgatccgaccgacgagctgccgatagtgagcctgagcggccggattgggcgacggagcgccgggccgggcgccataaggctcggcgcccgcgtactggccaggaggaggccgtgccggttggccaggctgtgacggatagcgtgctgccccggcagcggccggaggccctccaccgtccatgccgttgcggctggctactgggcagagttgcgagtcttggcgtcagcctttgtcgagcgatcaaggagcagcgagagggaagagcgcaccgtagccacctgaaggaccggcgcggccgggaccgccattgagactgccggcccggctgccggggaagacgccgaagcgagcgatggttccgggtgggacggagccgtgcgcgttggccatgccgaaggacgaaaggtacgcctcggcgtcgtctaccggcggatgcgcggccagcgtcgccgacgtctggatctgacgaaagtcgttgaagatcgtccaccactgaccattcaaagggcagggaggtatcagcctccggtatggtgccgcggacaagaggcacgagaactgacctcgagtaagaggccccgctcgctgcgatcgcttccctcgacctcaggctttcggagctctgaccgactgccggcgctccggtcgtcgccgctgctcttcccagaaatccggccgccggcccgtttgcccttgcccgagccttctgcatcggccttggtccggacgtccttgcctttgctagcgtcagggccgcccgtcccgctcacggggctgggcaactggccggcgtccttgtcatcgacccgccctccgccgctaccgccattggtcatcgacgagtcgctgtcgtgcgaccgcttgcgcttgatgacgtttgccggaggcgactcgcccatgacgagcaggtcgcgtggagacgagtgaaccgagccgggtgaagggagcgctccattcgacgacgccgacgatggctcgcctgtcgtctcggtcagcagcgagcgagcagtgtcaaagagccgcgccttataaaggctgtcgcgggtcaagagggagagagacaacgtcaggcgcacgccagaagcagaaggagggcagacggggggacgtacaactcgtagacgagctcaacaaactgcttttcctcttcctccttgctgaccgccggctcaatgaccatccgcgcgcggcccttgcccttaccgacgctggcgaccccaggcagcgagccgtgctccgtgttgcgagccatcgcctcgccgttagggccgccgacatgccgagcgtccagccgatagtgacctgcaaaagcccggccgccctggccgggcggatgacgaccagcgcccgctccggcttgcgttggcgacgagacggacccgttcggagctgacgcgtagaactgtgccggccgctggcccgaagcatgaacttgagcctgctgcccctggccctgcgatcctgcttgctgctgctgttgctgctgctgctgctgagcgaactgctgcgagctcgtctccccgagtcggctcgagccggcggccgtcgcttgcgcctgaggcgtcggcgcctgctggattggtggcgcggatggagcggacagcggcggaacctgctggccaatgggactgatacctgatgtggcaagcgacgactgggacgcgccctgcgccatgaactgctgggccggcagctggatgtgcaggtttgaggatgacgaccgctgcatcgatggcctggcctggttggccacttgaggtgggtagcccgacgactgctgagagcccgacggctgctgctgctgctgttgcgagagcggttgcggctgctgagctggatgcccggggtgagatggcggcgcggaagggtagcctgctggtggtccctggtcgttcgcattcggaggcggtcgctgagcccgcatcaagtgctggtattgctgctgctgctgttgctgatgttgctgttgctgctgctgatgctgctgctgctgcatagccgccggatctctttggccggccatactcgacggccgccgtccgcccgacggctcgtcgtactcctggcccggcggaggttgaggcccgccttgctggctgtaggcggtgtaggcctgttgctgtggcgggcctgaaggagaaggacccgacaagtagtggtactgctggcccgggtgcgcgctcggatgcggcggaggtgcgtgctgctgctgctgctgctgctgctgctgctgctgctgctgctgctgtagctgctgagggtgaccgtgggccggatgggcagacatgtgatgcggtgcggacggaggccgagaaatgcgggccgtctgctgctttggccaagcgtcaaatcgtggcgaaaggagggcaggttgggcagggcgcgaacaagggtcagacgcggagctaaggaagcaagctgctggcccggagggccggcgcgtcgcacgcaccatagcttggggaccgtgcgagacgcaaggatcaggcgaggccggcgcttcgaggaactccgcgggcacgcgtcaagtcggcctggtcggagcgaagaggctggttggacgagcgcaagaagaggcggagagggtcggaaggaggcgccgcaacgtcagtcgtcgagcgagcgagctgcaaagcgcggacggaaggcgaggccggccttcctccggccgatttgagcaccaaccacgagatgcagcagatgggagcgctcgcccggcctcctgcgcgacagctcgagctcgagaggcaacgaggcacagctgagcggccacttcctccaggcggaggtccgtagccgccactcccatcgcgttgcggaggtcgcgcgccgccgcctgcctctcctccttcaccggacgcgcgattggagaggaacgtacctcgtcgacagcgaatccgcgcgagccgtcgtgtgggcttgagaagaaaggttgctggcgagaggaggcagggagatacgggcctctttcggtgctgctcgtccggggctgaaagggagccggggctgtttggcggaagcgaagaggtcggacctgtagaggttccgcgtccggacacgctcgacgaggctaaggcaggagtcgggagagaaggatcctcgagcagtcgtccgttggctcgctgctgggacagaggggtcgacggagggaggctggggcagcagagacggagggggggaggagaaggcgccgaggtcctgggccttctcgccccgcccgacgcgcgagacaacgcccgccgccccgtcgtgagccgggctcgagccgacctgcacctgcactttttccagaagggcagaaggagagccgtcgccttgtcgatggcgcagagctgtgcatctgatccgtcttcaagctgtcactttctgcagatcgagcagtcgagtatcactgatcttcctctctccgacgtcaagaaccgctggctgcccagagcaccgctcgccgggggcagtcgtgtctcccggcggaggacggaagcaacgtgttccgaaggagggcctcggaaccggccaggtcggccagcggaggcagagcagactactgccccaggcaagcgaggcggtgcgctcgtgagcgtcgtggccgtcttttagctgtcgaacaggtagaggatggcacgccgccgccggttggccgtcgagaaggccggccagctgcgctgacggtcgtcgaggccgggctaatcatgagggctgaagacgcccttacctccttgggcgacccagagggcctgcatctcctcgaccgggtagtcgaggccgggcaaaattgtgttacgaagcgtctgggagaaaaccgagtgacgcaggggagtcggtttgcgggcagccctctagaacaggggcagagggcacacgcacctggcgatagatgtgaccgaggtgctcgttgatggccttttccagggctgtgaagcgcgcctcgacgagaggaatctacgaggcgagaatagcggagcaaagacgaagtgtcagcaccgaggaccgactcctaatcagccgtcggcgacgcaccttctccatcgcgctccccggaatcttcttcttgcgcgcgaggtcgagtgggcttttgcccgcccaggctgcagggaacaggtaataatcagcaacatggttagacctggagcgtcagccttgacacggcacgtacgacgaggcgggagctcggttggtccgtgctcgaacggcttgccggcctcctcttcgtcgtcgctgtcgccgtcctcctgatcggacgacggtgccgactggctcgacgccttaccgcgcctcggtcgccggccgcctgccttggctcgcgtgctggatcgctttgatccggtcgtcgcatcgctgctctcgagctcactcgcgctcgacgacgatctcgccttgccgccgcgccgacctttggctttcgcctgcttcttggccgccttctcgaccgcggggacgaccggcggcggacgactgtcctcgaggacgtgctctacgcgcgagacgtcggccctgcgctgctcgagcttgcgccggattgccgtccggatccgaggtcggatcgggacccattcggtgttgacttcgacgaccgggttgaggcccgcgtcgagcgacgataagcccgccgcagcagagagcgagccgggtatccgaggcgcccggctagcccgcctggacttggaggccttagcgagaggcgcgccagagaccgaacccggcgccgagcgcgacagacatggctccgtcgcgatcggcgagagcgcagcagatgagccgagggtcgtcgccggtcggccgccaggaggtgtcgcagagttcgtcgtcgccggcgcaagggtgaacgggaccgtagggattgactgcagctcgctctgggcagtcgccggggggacgtaagcagagaccgatcggagccgtggcggctttggcatgcccgtcacggagaaagggcttgatcggctgacgcttgcggctgggtcgttgaccgcggcctggcctggctcggatagcgaccgagcaagcgccggcgaaggatgattccgggaaacgtcaagggcagacctcggcgtctgacctttactcgggcgcacggccgcctcggtgaccgacttgcggcgttttggtggtgggcttgccctcgtcgctcgaggactgacgccggaagagtgacaaggtgcggccacaggcgtcgagcggtcggtgccggcctcgccgaagggagttgcccaatcgacgccgtttggaccgccgaggacgagcggcgtcgtcgcaccgacagatccggcttccgagccccagctctgggtgcggatggttaccggcagttggccagaagagagatcttcggaacgacgtttacgcgagctcgagggccgcctccagttggcgtaccgccctccgacccggccctcgccgtcaaaggagctcgtcgaggatgacgccgctgacgaggcgtccgagtcggacgcatagggcgtgtagagctctggcatctcgagtcgaggaggctgagcgctggcctctgacagccgctcctcgagtgaggcgagcgacccggggtttgccagaatgtccgtcccagcgacaagatctgaatgggaaacgaacgggatcggaggcgacatttctgtcggcgaggtggacacaagaagactcatcggcggcgtgctcgaggaggagagtcccgtttggcgcaactgggcgtttgcgtgagcctgatggacgagcagcatgtcgtgcgtcgcctggtcaatgccgggccagtcgaggaacagcgacgagggcggagagccgacagcggccatctctgtagaatcgaagagcgagaggagcatgagctaggggcgcgatgcagggtacgagaagcggcgaggactgacggtcatagccgggcatgcctgcagggtagaaccctgaccgaagcgcctgccagggatcggaggcagccgtcaagcggtaggccagtacttcgaccgagcttctatcgagaggatgcggacgagcgagatccgctacaggcggcggtcgcgcgatagggtcggaggaggcatcgacggagctgacgctgatcggtggcgacagacatcgtgtctggcatcgactgccgctggctgaagccagagaaggcgaggaggcggcagagagcgtctgccttgatgctggataggccggcgaggaggttaagtgcgagccgctcgacgagggcgtctcgaccaagctcgagccggccgacgagctcggcgtgccgagaccgctgagcttgtcccgagctgctcgcaagacattagtggatacttcagttcagcaccaggcgggaagacggacgaaccgactgtccatccagccggtcgccgccgactgtgcgccgcaaagggcgactgctggttcgggcggaggccgcgcgactcacctggtgtcatccgggcgaggccagaggcgtaagacagcggcggcacgagatctccttctttcgaccggatcgatttgcgctcaacgtctagactgcgttgccgaggagaggcagttggtcaacgaagcgagaggtcagtcagcacgaggtccatctggcgcgaccggtcggagccggcgcttgagcagcgctctctcgtgcttcgcaccggctgcggtgatctcgacgtgaaccaacaagcaagtactcacagtgccgaggtccaggtgcgaggttgcgagcgacggcaatcgatgggcgtgagcctgctgccctgtggcgggtgccgggcgagccttgctgcgggcagtcgtggccggtgaggctggttgtcggctggccctcgagcagatcccgcctggtgcgtaggcggtgaggagcccttctctgtggaaagactcagatgcgagcagtgtcggtcaagagacagacggcaggaggcagaggaggggaggcggctggagttggggcagagcagcatgcagcaggcgctcctcctctttcagccctcacgcctccgttattcgattacgagattgtcggtccggctcagtcagacaagctcgcgctgcttggctgcactgcggcccggccagatcctcatcgacctcgtgcagagcaggcacggcgaggcccgtccagctccctcttgctcagcgtcacgaccttgccatccgcgaaggagagcccttcatcagcaggcttgctcgttgagctcgccttgccggactctcagccaggagaccgccggcgctgaccgccgacggccgtcgtgcccctctctccgccagcttcgccacatcagcacgaaccggaaaggggcgttaaatcgtaaggtcgtagacgggggggatgagagagattagcccaaagagggctcgctggagagagcgcgaggtgccgaggctagagtcgcgaccggcgcgactcatctgcggtcgtcgtcggcacggacgctgccggtgaagggagcaggccagagccgttgactgcgagcggagaaatggcggcagaccgacgactctgcttcggccgcagcggttcgagctgtgatcgaggcaaccgatgtcagcgcttcgtcggaaaggggtgccagcgaggccggatcggcgcaccttgcgccgaagatccttcatcttctgactgtagggcgcccactgatcaaagctcgcacgaaggtcggcaagttctgcgccgaagagctcgagcacgagctggtcttccatgatgccgcgctgtggcggcaggtgcgagtcagcttgctgcgaaagcgcggcaaagaggccgacaccgaacgcacgagaatccaagggacgtcgtacgagttcttgtgctcggaagcaaggaactcgtcgacgaaaagactgcccgcgggcgcagggctgtcgcccgactcgaacagggtccggacggcaaagctgcggagcaaaagagcagactggcgtcagtcgggccacacgtagagcgaggactgcccgtcgtcgaacgtacgcgtaggaggcgtcctcggcgtaggcggtcgaatggccgacgccagtcaggccgtgggcgaccgactcggagagatgagcgatgaggtcgccgtcgtcgatagcagcgtttctgagctgcaagcagaagcggatgaggtgggtgacaaagatcgagtcggcctggtcatacgcccagccgtcgacgtggagcagacgcgtgatgttcgggtgatgggcggcctcgaagatcgccgagtaaaccgggacgacctggtcattcagcgaggcaacgaggacgatcttgacgttgtggtcgagcaccgtcccgagtgcggcaatgtactcgcgcgccgtcttggactcggtgtcctggaactcaaagagctcggtcgcggccgcgttgctgtcaaagtactggatgacggggccaagcacagccgatttgttgatgtaggtcagcggcccctggtggacgccgcagagaccgagcatcacgatcgccgtttcggtcggccggatgtagccctcggccagcagtcgggcgagcagatggacggagaccggacagccctgcgagtgggtgccaatcaggatggcgtcggccttctgcagcttgtgcacgtcctcgcggctgacgaggtcctggaagagctgttcgacgcgcgactggaccgtcccgtcgccctcgagcggcatgacggtgacgctctctggcggctccagtccggcgccctcgacgtagcggtctagcgccgcgcgcatccgtgtcgcaaaggcgattgatgtgcccgtcggctcgccggcaatcttgagtgacgaaatggtcagcacaactcacacgacgcaaaagacggcgcaacgggaacccactcgtcgggtgatgccgatcggaaaccagccgtgagcagcgaggatgacgacccggcgcaccggcctccgtgtccggccggtggcgatcgcgagcgtctttggcagcagcagcccgcgttctttgccgaggcggacccgctcttccgccggcgacagagcccgctgattcttctcggcgacgaggccgagcgcaccgagcgccttctttgcgaggcccgagcgtctgggaaggggcggcgtaaccgaccgcggcggccgactgaagatgtcgtcgaacgaaggcaagacgaggttcggaggggcgatggcagcgacggcggtccgagaagggccggccttgggcttgacggcgaccggtgtcgtcaggggcacaaccttggccgagacctggccgacaaggctggacgcagagggcgacttggagatggccgagaagaaggagctcttctgcgtccggaccgagctcggcggcgagggccgaagcgaacccgcctgcttggcactctcctcgtcgtcaacgttcatgacctcgccgacgtcagcgccgagtccaattgacttggtggccgtcgccgaaggccgctgctggccggtcgaggaacccgcgacgctcgccagccacgacccgtacgaccgaggcgatggcgcgggtgaggagccggatgatgatgtcggcagcttgttggagggcacggccgggctgacgatggatagtgcatgagcaacgttcgcgcccgataccaggtccgtcgccggaggtgaatcggcgctggctaatggtgcctccggcagagcctcggctggagcgattgacaacgatgagccgtacagccaggtgagaggacgcaggtaagacgcagtcctggcaggctcttcaaccgacgccggtgcggctttcggcgccgtcggctccttcgcatggtcttccattgacggctctgctttgacaaagaagcaaggcaggagtcagcggtcgattgcagcaggcgggctgccaggcgactgcgcaccagcatcggccggcgaggggaccagaggtagtggggtgccgccgacgaacggcacgtagccccaccagctgccaccaaccgcgccgatggctgctggattcgcgccagaggtcaattccggcgcggtcgaggtgacggcagcttccggaacctgctccggacttgtcaatcctggctgcttgacgatctcttcaggcaacgggatatcggcgggcacagatcgcgagcccgacagcagcgagaaccacgacgccttggcgacgtcgccctcaggcgtcgccacctctgttggctttgactcgacactcgacgttggcggcggcggtgaaaccgacgagctggcttccggagctgcggcagcgacattgacatctgccgacggggggactggcgctggtgaagccgtcgacatcgaccagaaccacgaggagggcccaggagcgaccggcagatggccctcgtggacagccgcagtggtctcggtcacaggttccggagcggctttaggcgtgctggttggacttggctcagcggcaggcggcgtcgctaccgaggcgaacgaccggacgaccggcagagctgcaacggtcgagatcaccggccgcgggatccaagcgagggcctgctgagcgacagactgaggtcgcggcgaggtcgtttcgacatccctgagagcagcctcggcctcggaaggcgcctggccgatggacggcagaggggtcaaggagactgtcgtcggcggcggcagggttgctgcgcgagtcctgagctcgggagaggcgggtgtcgagttggcccgctcggcgactaccgtacttggaccggccgcctgatcgagctggccgggctcgatcgagacggtgcgcgtccacgtgccgaaccaggatggcggaggaggcgctgcttgggcgactggcgggtcgggtgggacgacctgaagggggtccgtgctggccggcggttcgtcccatgactgcgtcggctcgtcggctgtggttgcctcctccgaggccagcgacgagccgcctggcgtcgtcaccttgcgacgcttgagaaacatgccgacctcaccgccaccctcgccgctgaactcggtcgggacgccgacgacgacatcgccccgacccttgttggccttcttgtcgagctccttgcgctcgagcacgagctggagccgggcggcatcgttctcgagcgtccgcttcatctcagccgtgctcgtgctagcgtcggatgtcgaggagccagacgcctggcggtgtaggcctggcgaggacgaggtgtggagcgtgatagcgggcgaagcggcgagcgaggcggatgggctgagcaaaggtggactgcggaagctcgagacgaccgagcggcgcgagtactgcgacgacggacggcggcgggggacggtcggtcgaggctggctatctggcggtgtaggagaaggtgtgggtgatggagagggcgccatgcccggggctgttcgaaggaggcggatggtgggggagaggatgaggatggcaccgggcgggtcggcaaggtcgacccggcggcgcgcgacttgagcgtacgtctcgcccgccgcccgctttcaacaacagcactggaccgtctcgcatcctgcgtatgaccatcaagagccgtcgaggtgtcatgcgccatcacagaggcagcctcgcccagtagcggcctctcgaccaggcgtgccggcaatgagcgcgctacgggcccgtcggtcatcctggacccaaggcgtgaaggcaaggggggttggccgccgtagtactggcggacgcctagcacagagttcctggcgctagcccgggaccgatgtctcatccgccggcgctgctcgtctgctcgagctcaaactcgcgcacgagcctctctcggcgggcggcccaggcgagcttgtcgcgctcgatccggtccctgatgccgtcggccggttgaccgccgacctcccatccctcactgccacggcggacgcgctgggcgagcagtgcgagggggacatcgtcctcgtcctcgctcgagtcggacgtgtgagatgactctgagccgcgacggccggcggcggggcggccggcagttccggcggctgggccgcctctcggaaagtgagagggatctttgggcggccagcagacggacgagtactggtctgtggtgccagggcgagcgaggccagtgcggttcagcgccctgaatcaacagcgaatgatctcctccagcgcgacttacaccctcgtcagactgcctctgcgagcgcgccaggtttcggaacccgagagaactcgacccactcaccactgccggcgccgacgcggaagaaggtcccgcggccggggtcgtcaaccttgcgtcgcccacgctggagcggccagcaccagagccaccactggcggcccatcacgctccggatattggcgagcgggccgaggtcgtacgggtacttgatcgcctggatcttaccgcggcggatgagcgtcgcgaccttctccttctcgtacgcttcgatcgtcgaggtgttggagacgacgcgccagtagtgcgagagcgtaaagaggccgacaacgagaaggatgatggcgccaaagacaagagtcgagacgagcaggataatctcaatcgtgccgggcgggtgctggcggcgcaagcgtcagcccggggtccgatcaagagcagcttccactcgaatgggcccactcacatagtagttgaactcggtgctctgcgccaggtcccagactcgcgtcgcaagcgcaccgacctgcatgcagactgcgggaaggctagggcgatcagcgcgctagttcccagggcgaccagggacgatcatacgcacgcgcccagcaggtgaacgtcaggaagcggacaaaggacgcgtagttatagtgtccgacgcagccaccgatccaagggcagtggtggtccatgcgaagcacaccttgggaggcaagcgaggtcagcgacgagtcggcggccagcctcatgacgcgcgggcgacgaacgcacagcgcttgcagacgcgacagtgatgagctcgaggcggcttcggtgccgagcatttgtagcagtaacgcggcccgccggtactccgtttgacctcgaggtcctctcgggcgccggccggcggctcccatttggccgggacgcgtcctgggtcggtcgtgacgcaggcccagtacgaggcaaagaggccggcgaggaggacgttgaacgagacgagaaactggatgagagagagccggtcgaagaagcgcgagaccagccactggcacgagaggccgagaaacgagacgagcgagacggtgaacgagatcctggcaggggaaggaggagaggcagggagggagggacctcgctcgttagcctggactgccagctcggagggcgccggcttggcggctcgaagggggtcggacggaccagagccggttcttgacctcttgagaaggcatctgggcccttgatggcacagctggcgatgctctagccgagcggagagggacgtcgttcgcaggaggaggagacgagggcgagctcacgtcgagcaaaggacgccgtcgcgcgcagcaagcccgtcggtcgcatcgcctcgaagccttcgttgctgtctcccttgctcaagaaaacctgcactcgcatcgcaggtgagcctgaatagtcgggcatagcagacgcaactctgaaagttaatctaggcaggaccaaggaagacgccgcctagtccaccgctgacgcccttgccgccgccgccactgccgtcgcgaggagccgcaactgcggcctccggaacctcgaccgtgacgagggcgcgttcgtccgaccggatcaaagcaagtccctccttgacccattcggcttcctgttgccgccggacgatgatccggacgccgcgagccgccgccgacgccagctgcttatcatcggtctctggctgcgccagccccgggacggagaagacgccgtcgattgaccgctgtacgagaaagtggcggtagaaggggatcatgagctgagggagcgtcgtcaggtcgaacacgatctccatcggcggctcgtccttcggcggcgggggtgcgacggcggccgtcgatgctccctcctcgggaggccggtggatcggctgaccagccgggagtgcaacgaaacgctcgacgagcggacgggcagcgtcgacgtcgccctcgcgctcagaaggcgcccgcatccgacaggtcaggttgcagccgacgaagcggacgcgcgacagtcgaccggcgcgcatccactcgttcgtgatgacctcccacgagcgctgctcgatctcgaagtcgaccttgctcgaccggccaaagcgaggccggaaggtgatctcctgaggccggacgagcgcaaagaagggcgcgtagccgatcgcaccgccgtacgcgagcgagaccgaaagcgacttgagcagcagcgggtgcggcggcggcgaggaagccatggcgaggcgcgaggacgacggcggcgtcgagggctgaatgaggagcgtcaggtgccgaatctggtggagcgagaggtaccgctcgagcgccggcgagacgggcgagtcctggcaaggtcaaagggaatggaacattagtgcggttccagaagtgaccgaagtcgattgagcctcaccctctgcacgaagagctgttcaaacgagccgtgtcggtcgatcgtcacgctctcgtagaggatcggactcgactcgcgaaaccaatcccagcatacgaggctggcggcgacgagcgtcgaccggtcggcccgcgcgaggatggacgcgaccagctcgatcggcaggtagggtagctggccgtcgaccgcctgctttggattcggtcggcggatactaggcggcggctgggactcgagcgccgggagactggcagcgagcgagttgaggtcgatcgaccaccttgacggcgccgacgtgagcgcggtcatctcaggaggggggagccggtgctcgcgagcaatctccggctaggagagacttggtcagtggctgcagttgcatatgagtggcagtggctctggacgaagagcccggcgagcttgaccgaccttgaggctgttgcacgagctctgcactggcggatggagcaggcgacagcgaggtcagcaagcgagcgtgaaagccgccttgatcaagcttgcgatgtacaactctagctgctcggaagctgaacaggacctatgggctctttcgtatcgctcggaagggcgggagaaaggcgtagggttgatgggtgagaggcaaggcgatgtgggggtcggcggtcaggggagagtcgcgctgcgccgaccgggtcaggtcgagcggctgaagtcacaacagacggcgtcgaatccgcttttccctgtttctcaggtcccgtttgcattgctcgagaaagacattgcagacctagtaggaccgacattatgtacgggaggtgctggtttagagctctatgttggcttcacgggcaaataaggtccaaagtttggtttgttatttataataagcttttcacggcccacaacagaaatggagtagtaatcaagtggttaagatgcttccctgctattttctagcactcaggaagtgccctctgggcgcgcaggttcgaatcctgtctacttcgaaatgtttcttttgtttatttttttttgattccgctacacgagactgttgagcttttacttctgccgctgcatcgttaagtacggcgaggcagggtaggaaggcggcggacccgggcggcggggggaacaggtcagtaccggcggtcccgtttccctgcccgccccgacgacggcccacgacagcacggacaggactgaccgatcttgctgctctcgggatcgttggtggtcgtcgacaggcagcgaaggggggcgacaggtcgaagcgatcggccgcgtgcgcgggcgcagcagcccagcgacctgcgccccgggaccggacccgcgcgcactcaccccctgagctagccaatcaccctttgatcggatgaccgccaattctcttgatctagggtcgcatcgtcgatggatttctagcggtaccggtctcgctgctgtcggacgactttttgttcaacccccttttcttgagccccctccctgaccccgctgtccctcaccttccctctcgcccattcgtcagctgttcgactccttcaccgacgtcctcagctcggtccgcgcggtcgtcgcgggcgagcagacgccggcggacgtcatggcgcccgtcccggcggctgtggcggcctgaagagggaggcggactggctgctttcgacggcggttaggagtgcaacttagacataagggaccggaagaagctggagggaaactagatctctgacatgtgacggtttgtctcacgacgtttttcgagttggcgagggtaggcgaacgcgtactggcccttctcgggacgactcgctctctctgcacgggacctgtccgcgacccccgcctccgatctttgaactgcgtgcaagtgggatcgagatttccggttgtaagagacagcattggtcgtacagggcgcgagaaagagatgcggaggagggcgttgcaagagagagatggaggagtcgtgagtggatgagcaagaggcgggttaagtgctttgggcgcccgggcggatgggcggaagatgagaagggaacgatgcataggtgggcgtgtgggcggaaaggcgagcgtgcgagcgagcggcggtagatcagacttgaagaaggaggggcaagcaaggtcctatcagccgcaggtgatgagaagcgcgaaagaacgaggcaaactcacagccatgcgaacgatagtcggcgtcccagccgtcgttgccgagcttgctgagctcgccgtgatgcgtgtttcgccttttgaggagcgtcagcgcgtcctcctcgtcgtccgagtcggagctcgactcgctcgccggcggctgatgctgagcattgagccgggcgaggttggtcgccgacgggccggaccggtacggctggagcgggccgtccgtcgactttcgcgacgccttgaccttgtcgaggtacggattgctcgtctggccagcggccccgccgccgttcggggccggcgcgtcggacgacgaccgctcgcgctgaccgttgtgcatcactgctggcggcgagaggcctgccgaggacgtcagcggccgaagcagcccgccaccgccgaggacgcccgagttccgcttgagcggcggtggcggcggcggtggcggcgaggacgagtcggacggcgcgcgcgaggccggcgcactctcggtcgctgcgttgcgctggacagccggtcgctcgggctgagcgagcgcctcggccgtcagcttgggcgtcgaatttgaccggttgattgtcccgccgccgtaaacgcgctggcgcgacatgcgctcccagaggagctgcttgcggagctcctcgggcagctcggctgccagcatctgccggcgcgtcgtccgtggtgactgcggcgcggccgcgagcggaggcagcgtgctgtcgtcctcgagcggctggggcgattcgacgacaggcgctgcgtccggtcgaggcgggagcggccgcgtcgtcggagggtagtttatgtgctgctgatgcggctcggcagcggtcgccacatccgaggtggtggcagcagcagcggcggcggcagcgacagccggagtcatggccgtcatggccgacaagccgccgtgttggcgaggcgcgtttgtcgtcgccggcttcttggctgagaggacggccagccggcgctgagcctcggacgagccaatcgtgatcctgctgtcgcacaaaccgggtgcctgcaggaagggagggcttcaggtcagcaaaagggaaagagcgaagcgagcgtcggatcgacgcacatcgctctcgctctcgctctcaaggtcctcgcctcggccgacggtgaagcccgaggcttgcgggagcgcggcggtcgacttgttgcgcggcagcatcgccgaaggcgtccgcgagaccgaggtggtcgccgctgcagcgtcgcggccgtgctgccagagatcctgcgagctctggcctgcccgctggtggtaaatgccctcgcgcttctcgcgctcgaccttgaacatgtcgctcaagaggcccgagctccggccgccggcaatgttgccggtgcctgatcgggatccgtcggcggcgatcgtctcggccctggtcgtcggcacagctggcgacgacatggcgagagcttcgcgaccaaggccgtagaggtcggccgccgactttgaaactggcaccttgcggaagagcgacttttggcgctcggtctcctcctcggcgaaccggacggccgcctcctgtcgagcccgctcgacagccgccgccgtgtaccgcgtcgccttggttcgggccgctgctgccgcagacgatcgcctgccgagcggcgccggagctgttgccgtcgtggttgtcgtctgggcggaagccttggccgacttgccgccgccggctgcggcgggagaggggacacccgaactcgcgtcgtcagatgcccactcgccatcgccgccggagcccgctgctgtctcggcgcccgagtcggtctcgtacgagccgctgccgtcgtcgtcctcgacataaccggcggccgggtcggcggtggctggtgccggaggagaagtcttgacccgcgatgtcgtgatggtcagcttgctcgacgagctccggcggccattaagtggcggccgggtcggaccggcagaggtgcgactgctgccgctcccgctcgcctttgcgttgggcggcgcgagggtgggtccgagcgagacgagcttctcgcacggcgcggtagatccgttcgcgctgatcgcagcagcaacggccgaggccgcctttgcctgctcctgcgcaaaacaaccggcaggagcggtcccagcggcggttgaggtggggccggcgcttgctcgccgatgtgtcgtcgttgcaacagcgggcgccggcggcggtgccatcgctccatcggccttggagacaccatcgttgctcttggtcatgaccatcgccgtcgacgacggccggccaggggcgctcttgcgccggccagcgagcgccttggaggacgggccagccttggccgagccagtgctgccctttcgccggctgtcgctgctcgtcgtcgacgacgtcgactgctggcggacaggcggcttcggccgaggctcctcttcatccttctcctcctcgtcgccgtcgtcgctcacccagccaccggcagcggcggccgcagtcgtcttggctggcgagtctggcgaaggtgcgacgacgggcgcaggcgccggtttccgcgacggcagcgtgctcgtctgcttgagcggcgacgacgcgagcggcgcgtacgagggcgagacgattggcctcggcgggctgccggtgcttgtcgtcgtggccgccgccaccgcctttgatccgtggcgcgaaggagagacgcccgcgcgccgtgggctcttgtctcggcggcgcatttggagtccaccgtcctcgaggctctctgggctgccgatccgctgctcgccgacgtcgatcgacgtcgacgcctttggcgatgtcggaggtggccggctcgagtcgctgtcaagcgagctgcagctgccagagccctcgccattgtcgggcgagatgaaaaagagtttcttaccctcggccgcgggcgtcgcgccgggtggattgacgtgtccgcctgcgcggccagcggcggggataggacgctgatgcggctcgggcgaggcccggcgaccgggcaggttgagcgtgagcgctgctgccgatgccgtcatcgagccgagcgtgtcggacgacgaagtcgaaagcggactcctcgccatcatcggctcgagctgtgcgctcgaagtcacgaggtcgccagaagaaacttcgttcagcgagcccagcccaggtctcggagtgcgctctgagtgtcgagaggccgaaagctcgtcagcgggcaggttctgcagtggccaactcgaccgagagcaaaaacgggcgtaccttgcgaggtgccgtaggactgagtgaaggagaagccgtcgagcgcgctagacgagctgagcgtgtcactgccctcatcggttccccagagcgtcgcgtgcgcgcgcggcgcggggctcgacggcgtcgtgttggctggcgtcggctcgagcacgcggatgctcgggccacctccatggccgctgcttcctcggccgccaaagccgaggtagtggccgtgaccaccgctggaagagaggctgttgcgggcgctcgcttccgacgaccggatgccttctggggaggccgacgatatcgacgcgacgaccgtcgggcgtgggagcgagggtccgttagcgcccgtactccggcctttcgctgctgtacttgttgcagctggtggcgacgacggtggaggctccttgacctgcggtgggggcggtggcggggcaggctgctgctgttgctgatgtggcggcgatctacgcgcaatcgagcggacggtgccctccttgtagacgtggccaaggacgcggccaaagctgatgccagcgctgccgagttcgtcgagcggccgaggtggcggccggagaggtttcggcgcaggcgtctcatatggcgacgatgacttgagccgcggtgttgatttggcccggacggcaagggtcggtcgaggcccagagctgctgatgccgtcaccgccgtcgttcgactggccgctcgagcgatggtagtggtgactgccgctgctgctcgcgaggccgtcgatggaggcgaggtcaccggtcgatgcgtgctgcggaacagccgcgatcgacggcctggccggtcgccgtgaactgctcgcgccagcgacggtagcagcagcaacggcggcggcagacgaggacggcgttgtcgcggaaacgacggcgcctagcggaggaagcgagggcgtgatgggttccgagtgagtctcggtcgggccgtcgttggcgaaatcgtcctcggcctcgtcgacagcgccagcgtcggcagcggtcggctggccgccaagcgtcgtcgactggggcgggatgaagtctcgatccgagaggtccgattcgactgacgagctcgcgaccgactcggtgaacgagctgccggcgaccgacggccgccggccgtggtgatggggctggcggctccggtcgccaaacggcgggtcgggatgggccattgatgcacggaggtggccaccagaaaggctggctgcggttggcgtcgatggatgcagagacttgtaccagagcctttagggagtgggcgagtggcggagaggagtgggagacgaggggggttgatgagacaagcacggaggtcagctgagccgcggctgggcagaggtcggtgcctcaggcgagcaaccggaggagatcagagaacgagcggtgaacagggtggacgcaagcaggtgccaggccggcaagacggagatgcaggagacagggtagaatgggctgagggtcgccggccggtccggttgtgccggcgcccgtctcacacgccagcccagcccgggccgctttagctcgaggcgagacgagacgagatgtcgcctcgtcctccgagccctcctcgtcaacgaagaagcgctcggatgagagcaggccctaggagcgggaccagacctgcacccaagagtgcgcaagaggagaggagagggatgccgccgagccctgcctgcttcctcgtccggggccaccaagcaacgtcgtcgtcctccctccctgcctccccgcacgccgccgatccgatccggttccaacccgtccttctcccggccgggtgcgagagaggaaggagaaggcaggacagagcaggaagacagaagagaacgtaccgccagctaatattttcgagccgggagccgtcctggatcgagctctggcacttggtgaagacgcgccagagcgagccaaggccctcgccgcccttgacgtcctcgatgagcgggagggcgacctggaggtagggcgactgctgggccgagccgtacatcttgcacgggcgcgcctaaagcgaaggagaaaggagagagggaggctgtcggccggggcggagtgacggatggctgacggagggaggaggaggctcggctagggtgcgaagtcgtgtgccgggggggatagcgaccgagagggcgcgcacgcttgaaggtttctcactcgggtaggaaggaagggaggccgtgaagaacgtcgctgctgatgtctgttgccctgtgctgctcggctggcttgcctgtcgtggcgaggcgaaggtgtggacggaccagcagcggcctgctgaccccccgcattcagccgcggccgccgcttcgtcgggcgcagcacacccctcgaccgttcgtccctccgagccgatcaaccccttggctgcgaccgtctcctctcctgctgctataaccccttgctgaccttgctcgctgacctgcccaagctgctcaccctgctggctcgaggctcacgctcagctcgagacggccagttcaggagcacccgtgcgtctgccgtcaacagcgacgggggctgaactcatcgggcgggcgacgtcggccgtcgacccggtcagccggaccacgaccgcgctcggctgcgaaaggtcgtcgtcttcggctcgtccccttcttttgccacgccagcgagcagtagtcgcgcctagctgacctcgtcccgcttccacctccttggccagttcctcgcacgcgcccgagcgtgtcgctcttcctccgagccatcgctcaagcacaggcaatcgaggtcgcgcctcctcaaattccgtgccggacgcccgccgcctgtcgacgctaaaaggccgacgaccgtcgtcactgcctcggctcggcaggcctaacgaaacgcgatggagcgagccgagctgcagcaggcgaacagaggaatgccgccatccatcccgctcgcggaactcggctcgattgggaggggcgggctgaccggtcctccgtgatcctggcctttggtcgtcgctgctcactcatctgcgtctcactcgctgccagcggggctgctgcttgcgaaaggatcgctcttcaagatgcttctacacacattggaccccgttgagctgggccagagctggcttggctggctccgcttcctcagcctagagcaacaggatgcatgtccgacccgcagtcggcccggtcaagcgctgtcaacagtggtcgccgtgagacggtcgcctgctcgtaccctcgtctcccgcctctggtagcaacccggcacggtaagccaaggccctacccgaagggcctcgcgcttatatcctgccttgctcacttgtggacccaccgcatgtcacaaatctctctgaccctcagtcacccaggtcagcaaggagacgcacgacaactcacggtcgcccatatcagttaccagcttgcagagagagctcagagtgggcgcacgaaggagttcagactttgtttgggccggagcatagggaggcgagaggaaagcgcgacgaccgcagctttgggcggcgttgcggccatgcacaggatttgaggaggggtgcgctcaagacgatcatgtctgagcatatcaggaaggacctagggaggaaccggtcgagttgtctcatagaacaattggtggaaggagagaagacgagcagttccagcgccacaagcggtgttgcccgtcctcaggaacgtacgacgccatctcgctctcgtctgtgctcttgccgccatcaaacctgccgccggccgaactgtacccgctcaaacttgcgccgctcggcaaacctggaggcttttttcctcatcaccagctgcaactttaccgagcagaaggtccgggcgcgctttgagattgccggcgtcggtacgtgtcgggctgcggcccagcttcctacgatcagtttgtggcaggcattcactacttctgtctcgctctctcaatcgtccccgttggtcttcctgcaggcttcactttccagtgcgcgccggcttctttacagcctccctcctgacgcctggcgctgacctccgcgcgtatctctcgcctgccagctaatgtctttagcatccgagcttcctcttgagcggaaagaagggctaaatcagctgcaccgtcgccttccggaaggatgccgctagagaatgcatgcggttggaagaaaagagcgaggatggcgatgtcagggcgcactcttcctttggctacgaggggagttgtcgcgactcaagtcggccgtgtctccgagctcggccgaggactagctgtacacccaccagcctgtcagcagcttctcgtcgctgcctttatcggcatcagcgccgaccagacctgccgttgccgcccgccatgagtgcctcctcgctacaaaccgacgactccctttgtatttatctttcctgccggcccgccggcgcgcgccgccttctctttttcagtcagccagtcagtcagccagtcggtcagccggattgactgatagagccgctggctatgctgcactgaccaactactgacctgcttctcggccactttttagcatgctgcgtgggcagggccgcttccgacgcgctcttgaaggaggcttggaacggacgacgacctgtctctctccctcaccagccgcgcgcccagcccacctctcgcaccactctactgcatccctttcaacatgagggctccctctgcattccgctttcgcaacttgaaccccatgctcgcgcactctggcacggcctccatcaaggattcagctctcgttgttattgacgctcaggtgagctacatgcccgatggcaggacgccggtcgccggcatcgaggccaccaacaagcgcatctctgcgctcgtcgaacggtaccgcaaggtgcgtgccttcattccgtctgacaaaaaggtctacgactgacgctgatcaagggcacgcccatcggctgcatccctggctttgaaccccagggcaacgagcacttcatcgccaagacgcacggctcgtctttcacgacacggacctccacgagtacctccagtcaaagggcatcaagaacattgtcctggtcggctaccagccccagtgcgtcccgttagactgccgctgccgatcctgaccgagactgaccctaatcgtaggctatgcgtcttcactacggttcgtgtcaatcttgcggctgctctgctcgcttggacagttgctgacgtcctccctccttcctgcctgcctcctccgctatccttcctgcctgttttgcgcaagttcaggctgtgtcagctcagcacctcacctatcaggtcaccgtcatccgggactgcattagcagccacgatctcaagtcgtgggacgacaagcgcgacattgccggcgatgagttttgcgacaccgcctgtgatctcttccaggacgccctcggcctcgtctgcatgtcgatcgacatcctcgactagacttgcttgcctgcgcgctctccctcctcccataccctcctgctacctccatgagatgatcccccttgcacctgcacttgcgatcgcggcgacgataaggtggcggctcataaaacatgtggcagattcgtgaccttcatgaaggcttctgccgaggccgcgagtgcgcagcggaaaggggcggcatcggagtcacgaggggggcctcttcgctgcaacgaagcgtccctgcttcggttgggtcgccgatgagcgagcgcaccaggggagcctcctgttctagacgcggctgttcgcccgttttcagctgccgccgcaatcacttggctatctgtcctttttaccttgcggcgagcagacggcggaatccggaaagggtataagagttgtcaagccgggagcgccgttcgctggccaaaggggcctagctcgacgcctaacttctttcttgcataccctttccgtggcctgctcgggctcctgtcccgggcagactgtcctgctctgagggtccgtgatcgctctgtgtcgaccctcgctcccttccaggaggtgcaagacgtcgggtcgcgcgcagcactcgtgccttgcgcaagaacccctcagacgacacggtcctctctctgccaaccggatgcgctcagtctctctctcaccctcgcgcgccctctccttcgccggcgtgcagttaactacgccctgtgcggaaaccttccctttcgagatactggacaaacccctgcactagtaacggcaaggtcgtttgatcggcgccggggggcaagacgcacgcgatggccagcatcaactggcgcgcacgcccattcggcgccttcacttcagcagagggaagagtccggacgcccgcaaaggagcagagcgagtcgccggccaagggcgcgagtgcacggcggaaaggcagcgtcgaggccacaaggcaagaggctcgtcgctgcaacgaggcgtcaacgcttcggttgagttgccgttgagcgagcgcaacgtccgcgagagcggttcaagtagccgaggcaggagaggcgactccgccgctcgccgagccctagacgtggcctttcggctttggccctcttcaacgtccgggccgcagaccatccgcgacgggcacttcgcctcacgcgccggccgtcgtcgacgatgatagaagcttgctcgacgacgacgagaagccagcgatggcgctactgctgctgctgccgctgctgctaccgctgccaaagctgaagccgagccggttaagcaggccctcggccttgaccgaggaaattcgcgccatgatcgtcggcgggtcggctgcagagtgcctcgagcgtcagcagacagcgaggcgagaacgaggtcgagcgagggcgacgcacgatcggccaggtcctcctcacggaccttgcgcttgatcgtgtccataatctcgttgactgacgaccggtcgaggtcgtccctgtaggcggtggaaggaggtgtcagcgcggccacaaaggcggaggaagggagggccggcgcacctcgcccgaaggaggccctcaatgaaggcgacgttcggaccgtggatcttggcaaaggtccagtagtcgagaaagacaagctccttgcctgccgcgaggatcgcgagcaccatctcgacaacctcaaagtcgcgctcaagcgcgtcggccgggcggaactctgcaaagagctcgtagagctggccgacgtcggcccggatgcggtcgacggcggacgccatccggagcttggacgccttgcggaggcccgagacgtagaggacgaggagcgtctcgagcatgtcggccagcaaaagctcaaagatggacgggttgaggtgggcccggtagtcaagtaggtagtcgcgcatcgtctcaacgacggccggcatcggccgctcggcctccgagtaccatgccggggcgaagaacagcttggtcgccgcccggaggtcgtggaagacgagatcgatgagcgcctgcgcacaaacctttgcgacgtcgaggtagccgtcaattgcgtcgttgactttggccgcgatcgtcgccgccagcttgtccgagaccatgccctcgcaccggccgccgagctcctcggcccggtcggccgacttgagctggtcgttggcgagcgccatgacgtattcgacgagacccggcggcgactcgtcgggtcgttcgacgctccgcttgagctcctcacggacaagcgcgccaaagcgggcctgggtgagcttcataacccgattggcctcgtcaaaggtccgggcgaggatcttggcctggccagagtcggccgcgaggtcgacctgctggttaatcatcgagaacatgatgacggtgccctggaggaagtactggccgctgtcgtcaatctcgacgggctggtcgcggacggtaaactcgcgagcctcgtcccgaaggaggttggtcgtccactcgtccatcttgcggacgatcaggccgacatagtcttcgatcaggtcctgctccttgccgccgagcagcggcggttgtgtccactcggccggcagcgctagctcctccgagagctcgcgcattgacgccttgtactccttgacccaggcgtagagctggaggaggacactcgcctcgggcgtcgaccggataatctcgttgaggatccggtccaggttcgagtggtagcccttgacgtagagcgcatggatctgccagtcaggcgggaagcacgggacgaggacgttggcgatccggtagtggtcctggtagagccaggccccaagctggtcgagaaagtcggggaccgagccctcgaccgaccgccaggcttcgtcaaacgtcgcggcgatcgatgaccgcaggagctcgagaagcaggtgccgatagtgcttgatcggtctcgcctcggcctggaccgagcgcaacgacggccgcttgagcgccatgaaggcgagcttggtcgcggcggcctgcaagaccggaaagagcgacatgtcagcgccctggaaggcaagctgccgccggcaagaggggcctcaggcgctcaccttttcatccgcctggctctcgacctcgcaaatcttgagcagaatgacgagcgtgtcctctcggccgcggcggcagagctcgagcgcaagcccgccgagctcccagagccaggcctcaaagccctcgagcacgcgctcgagctcgccaaagtggccgcggacagcctcgacgtcagctgccgtgcctttagaggcttgcaagagcgtctcattccggaactgctcgagcgccgtcacgtgatggtgaagctcgagcaggtacggctggggctcgtatggcccggcctgggtcgactcagccaggaggtcagagacgagcgcgaccttgtcaccgatctgcctgaacgaggtgacgagcgagagcgtctgctttatgttgcgatggatgatcgagacctagaggcaggcgagcagcaaaggaggtcagcttatgccgtcgggcgcagagagcccattgtgccgcttgcatctgcttctcaccttgctgatcttgcggaactctgcgagagtcgtcccgctctcgccgctctcgtgctcgagcaggtcctcgacctcacgcatgccgtcctcgacccggttcagggcctgcttggcttcgacaaacttgcgcaggccttcgcgcgtcgtcgccagctggtcccgaacggccgtcgagagggccgactggatcgagctatgctccgtctggagtcgcttccgcagcgccggcagcttcgagaggtcggacggcgtcaggagcagcgtcggcagcggcgaggtgacgacggagggcatgctgaggccgagacgtttgcactgagcgatgccagaggagacgagggctgagggaggagatggtcgaagtcggcgttgcggagaggcgcgcacgcgtcggccctgctgctcgcgacgcgttcgtgcgtcgccgaccaggatgtgcacatctcattcgacttcctttagaatgccgaaacagaacggcatgataaatcaggagcgcaccgggtgacgcctcactggccgcccttgagttcgtcgaaccactcgtcgcgccaggggctgcccagacgtcctccaacactagaccaacgtccttgagcttgcgggccatctcgaccacgccgggctgccggtaatcctcggtcgaggcgtcaaaacgcagcgaggtggcttttacaagaggttcggaaggtgtgaggcgaaccgttcggagagaagggaaggcgcttggctcttgacggcagcggtcgcagatgtcgtcgacggcgatgtgaaggaggtggtcggcgggaaagccggggttcggaggctgagcgtctccagcagcgcgtggctagcatcttcgacggagtccccgaggcagccatgatcgacgacgagtaaccgaaggttcggcagcgagcagaggaacgtgtcgataaggccggtcggccacggatcttggcctgcgtcttcgagccagtgatcaaggtaaggaccagctcttgaaggccagggcagctatcggcaatgcattgtgcgagctccccgaggcagtcatcgtcgccctcgagctgatgaactcgagtcgacaaaacgaggacggcaggagcggcccgatctcctccgcaaagaccttcgggtccgggaggtcgtcggtggaaaggacgcttagttggctgaggtcgaggacgaagtcgaggggggcgagccgagagcgagttcatgcttgtaagattccgtatttgagactctgcaactcgagcgttgtcggtctcggtctggggaatgaggcgtccggcgccgggagcgacagcaggcgataccgacgctcgaccgtccaacgcagcatcaggtgggcgatgttcgtcatcaaggaaggcgagacatgacttggtggttgtccgcgtcttcaaggtcggtaagctcgaaggtcttcacgtgcgcaccgagctgcggtttcgtctcgagcgtcctgaggagggtgatgatgccgcctgggtcgctacgcaaccccatctcgtgctcgctgaggaggggttgcttgaggagaggtaccaggagtccgtcctgaggaagacagcgcgatgggagtgaggggccggtcagaaggcgaatggaagcggggagggggggacaggcagagcgctgatcagggagacgcttcgaccgagatggtgccggcaagcagagcgtgcactgtaattgatgtaccctccaagctcggcagacgttaagcgattaggcccggaagtcgtcatcagggaccctgtagcgcatggcgtaccataggatctcgctctgcagctcgaagggcagcgggcgaggcctgggcgcctcaaaggggtcagcgcgtccttcgacaacagtggccatcagagggagaagcgtacgtgtcggtcgatgggactaagatgatcaggctgatcggctgagatcgaatgcgagggcgaaaacttgcgtgtgtggtgtcagtagactgctatagacgaagaggacgagctgctgactcggactcacgaggacacccggccgcgctcgatgccgagacaggaggaaacgaaggagcaagctggctgggtgggtactgcgagcgaccgaaagcgatgacagcgggagagcgagttgggtgctcgacgggcccggcacgcggagacggaaggcgagagagatgattgacgcgttgaggtcgaggacaagggcaggcggcgcgttgtcgcgcgtccggccgcaacgagcagcggcgcgcagcaggccggccgacctcaaccccagttcgcccggcctgaccttgcccccgaccgcctcggctcggacttgactcatgcttggtcgagataggcagccggccgagcgcacaaggcggcagaagcggtggtgatgccagcgagctcgagatggatttagggctgcggagaaggggaatcgccggtggcaggccggccggtttgctcgactcctttcacctcctggggtgcaaaaatgaacagaatgggattcgaacccatgcatctttcgatagctgtgatcccgctaagttttaacttgaaacagccgccgtaaccacttggctatctgtccttttcaccttgcggcaagcaaatggcagattctcaaaaccgtatataatcatcaaatcactcgcgccgttccccggtgaaaggggcctggctcgacgccttaccccttttctgcacactcttcatagcctgctccggatcctcttccgggcagactattctgctgagaggatctgtatgatcgctctgcgtcgacccccctccctcccaggaggtgcaagacgtcgggttgcgcgcagtactggtgcctggcgccagacttcctccaacgacgctttctcttcgctaaccaaacacgcgctctctctctctttctcgcccacgtctctcacttgacgacgcgcacttgtcgttgcaaagcactccgcccggccgaaggacctccccttttggaccgaccgacaagcgctgcactcgtcacggcaaggtcatttgaacggtgcatggagagccgacgcacgcgatatccgcagcagctggcgtcactccagatgccaggaaaaaatgggctgctcggagagaaggagggcgagaagccaagtgcaccgcgtgcgcagcggacgaagtcgccgcggcactcgcgcacactggaaggcctcacacaggatgctgccacggagacatgcctccctggaccgggccaatgacgatcgagcgcggcatacacgcgagggcctgctgcgtggcccaagtgcagaaggcgggaccaccgccagcttgccgagcttccggcttggccgcttggcaccagcgaactccgctcgtctaactggcgagcccttggccgctgcgtcttgcgcgtccggagcgcgtcaatgtcggcattggacgcaagcagcggacagtacaggcgctcagacagctgccgtcgatgctgtcgtcgcgggctcggcgccatcaatgcccgttggagcggctgctccggtcgacccgtctgccgccgctgccgtcgagcgcgccttctcggaccgcctacaaggagaatgaaaagagcgggagggtcaactcctgcttgatgagagcggatcagtgcagccgaccggcacaagagacgcaccacgtccgccagtgctgaaattggccgtcggcgagcttctggacgacggccgggccctgaacgcggagcgcgtgacggaaagccggctcgagcacgagtcgccggtgatgaagtgcctgcgggtagctgcagatagagagagcatggtgtcagcgagaggcctcttgatacggagcacgtagccttcttgcgaggacgcttgacttagtcgtctgtcgacacgcgcgaggacgcaaccgatcgtcctccgagcacgacgacaccagctgtacagctcgctgacgccccctagctcaaaccggcggaaagggagagaaagacgcacatgataaattttgcgtactcgggctgctcccagtaggccaggtatcggacgaacgcgacaaacggcggttcgccggccgcctctccctcgccgggcgcgaccgggtcgagcaggcccgaggacgcaagctcgagcaggtagtgcgggttggcgagcgcgcagagcatctgccaccccgacggatagacgaaagcatggtcagaagtgtcgggcgagatggtccgccgaagggagggcgctgctggctgagacctacctcgagttcgagctcaaacttggcctgattcgccgcacgggccgagtcgacctcgccgtcgttcggggcaaggccagcagcgtcggtcggctcgagagcagcgggaggaacatcgacgtccatgctggtgggttcggtcggtctgagcgggatgggcgtcggagggagcgagctcgccgtccgggcgcgtcgcgtcgtcttgggccgccggtgggagcatcgctcgacgccggagagccggcacaaagcgactcgacgtgcaactccttgtatgagcagacatgagcaggccagccctcttgtgctgaagcatgacgagacagctcatgcccatcttgtccggccttcgtgctcgatcggcgctgattcctcacctgaccgtcgagccgggctctcggcctcgagagacggcgcaggcagccctcgtgcgcaagccacgcctttgcacaacgagcgctcctttcgcagcaggcaggccgtgctggaggtcggagcgttggccagcgacgctctctcgtgtgctactgatgcgcccgtctgtcactgctgctgctgctacgctcgccttagcacggacgatgtcaaggatacgccgttggcgggatcgacggccgtcgtggtgcgtcgggcgagagagagagagcgaggagagcgatcgagacccgtcgtcgccagcagcaagcgccgccgccgccgccgcgcccgtctcagcccgcgcccgccgccccctctcctccctccgaccctcccgtcagcaagcccaatagcaagccggggagaggggaagtgagggcggtcagtttcggattctgagcagctggcagggaggtagaaaagcgaattttgagtgggcgagtgtgaaggcagggaggaggttgagagtggagtggaccgagaggcgcgtgggtgaggacgaaaggaagggaacggacgtaagtcggcggtttgagcccccacttgtcggccctttcccagcgcgccaagcgcgagatcgacgtggccggtccgaagcctgcccttaccgcatacgaacgaagacggggggtcagctgcggagatctcttgcagtcgcaggaagagggagaggaacggacgcgtgtcgttgtcgaagacgcggaggatcgtcgtcgtccggtcctcggtctcgcagtggactgcaaatcgagcgcagccgacggtcagcggaggcggctgcctgagtgacgaagggagcgcgggacgacgcactgggcttgttgccgccgagcgcagcgagggcctccttgtacggtctgcagcgcgacagttgagagtaggagtcgtcagcctgtggtgcagtcgagctacagtcggccgggacggacctgttccagcgcttatcgttcggctggagctcgccgtcctcctcttcctcgacgacggcaggcttgatgttggccgacttgccgacccgcgtcgccggcggccgctgccgctcaatctcagcgagggcctcaagcgcgccctcatcctcctcctcctctacctcctgctcgcgctcgtcatcatccgagagctcgacgacctcgactttcggctggctctgcttgcgccggggcgacgaccgctgaggttggacgatcgactctgacggcggctgctgtttcttggccgatccggctgctaccgagctggagctcttgcgcgctgcgaaagcgagcttggcctgggccgaggtggacctctgaggtgctggcgggggtcgagcagtcgacttggtgcgagtggcaggcatggctggaatggggatggctgtatgcggtctcgtctcggagagacgaaaggggggggggggtgccggatgacgctgcgggctgggccagccggcggcgtggggattttaaactccgccctgcgcaccgcgtgaataggctagggcgccgctccgtcccatctcctccctcctccttctctcccatctaccctctcccttctatctctctcttctagtcatgcctttgtccgtcctcatcttctccaagcgactggtctcacgagtgagccaccgtgctgacggccgcatctcctcccgctcgcagcgagatccagacgatccagtccaagccgttcgagggccagcgcccgggcacgtcgggcctccgcaagaaggtcaaggtcttccagcaggaggtacgtccgcgatcagggcgctcttgacgacgagggcggaagaagctgctgccgaggagagacgcttgggggcgtctacggcgagcgtgcagccggcgcgagatgggaggagggagagggcagccgaagggcagaggccaagcatcagtagcgagctcgctccatcgctcaaggaaccctgagtcgagactgacttcttccatctctgctgcttgcggacagcactacaccgagaacttcatccaggcgaccctgactgccatcccctcgggtccggccggcaagacgcttgtcgtcggcggcgacggccgcttcttcgcgcgcgagacggtccagacgatcgcccggctcgcggccggcaacggcgtcgcaaagctcatcatcggctacgactcgatcctctcgaccccggccgtctcgcacgtcattcgcaagtacgacggcgtcgagggtggcatcctcctgacggcgagccacaaccccggcggacccgagaacgatttcggcatcaagtacaacggcgccaacggcgggcctgcgcccgagaatgtcaccgagaagatctacgagctcacaaagacgctgagcgagtacaagtctgtgccggacctgcccgagattgacctgaaggcgatcggtaagacgacggtcggcccgctcgcggtcgaggtcatcgattcgacaaaggactatgtcgagcttctcaaggagattttcgactttgccgctatcaagacgttcctccagaaggagggcgcgcccaaagtcctctttgacgccctcaacggcgtgcgtcccgcgctcgcccttcgtcccctctctcgctgccagcccgcagcacctaaccttctcgctccttctcttgaaggtcaccggcccttacggtcgcgagattttcgtcaacgagctcggcctccccgagtcgtcgatccagaactgtgtcccgctcccagactttggcggctcgcacccggaccctaacctgacgtacgcgcacgacctggttgagcgcgtcgagcgcgagtcgatcggctttggcgccgcctcggacggcgacggcgaccgcaacatgatttacggaaagggcgcgtttgtgacgccgtcggactcggtcgcaatcattgccgattgggcagagtgcatcccgtactttaagaagggcggcatcaagggcctcgcccggtcgatgccgacgtcgggcgcgatcgacctcgtcgcaaaggcaaagggcttcgaggtcttcgaggtcccgaccggtgcgtcttcctactcttagctttgcttctgaggctctcctgggctgaccccttcccccctctgtgcgccaccgcaggatggaagttcttcggcaacctgatggacgccggccggctctcgatctgcggcgaggagtcgttcggcacgggctcggaccacattcgcgagaaggacgggctctgggccgtcgtcggtcagtagtctgacgccagacttggcgctctctcgtcgccaccctttcgctgacaatcccttccttccgcgcgcgtctcagcttggctccagattctcgcggccgcacaggagacgatgcccggggccggcatcaacgacgtcctgctcgccttctacaagaagtacggccggtccttcttctcgcgctatgactacgaggaagtcgagtcggccggtgccgagaagatggtcgaccacatccgcgaggcgtttgccaagcccgactttgtcggctcgaccctcaaggcgacgtcgtccgaccggtcgtttgtcgtcaaggaggccgccgacttttcgtacacggacccgatcgaccagagcgtctcgtctaagcagggcctctttgtccgcttcgaggacggctcgcgtatcgtcttccggctctcgggcacgggctcgagcggcgcgaccgtccggctctatgtcgagaagtacagccaggacgagggagagtacagccaggacacgcaggaggggctcaagccgctgatcgaggccgcgctcaagttttcgggcctcaaggagtttatcggccgcgaggagccgaccgtcatcacgtagagtcaggtcgaattgccccccggcgaggagaacatcctttttttgccgaatcttatgcgattaacacaggactttgcctggctggtcgtccaggaccagtggagatgccggaaactagtctaccggcgatccggtcacagggacggccggaaaaggacggaacgggggtccggggcgggagcccttgcgccggccgagtcaattttatgcaggatcttatcggatcgctgcgagaccggtaccgctgggttcctacgattcaggagaggttgccaaaacttatctggtggcgatccaatcagatggtggccggcgagccgaagggggggggagagtgagcgcgcgcgcgggtcgctgggcgcaggtcgtcgggctgctgcgcccgcctgcttcgccttgtcgcccgaccccttcccttcctgcctatcgacgaccaccatcgatcgtgagagcagcaagagcgtcaaaagggtcagtcctgtccgcgctgttgtcgtgggccgtcgtcggggtagggcaagaatccaaaaccgccgaaactgatctgtttcccccgccgccgacggcccgccgccgcctcctccccccggcctcctgtcagcagcatcgccatcaacctggtcctggctcgctccctgcgagctggggtctcatctctggtacgaatttgttcatcgacatcgagaactaaacctccggatccggccgcacaagatcttgggccgtccgacgcgcctgccgggcgtcgctctcgaatcagatcgagcaggggaaatccgagcccgacctccttctggtcagcggaagtcgaccaggacagttccggcagaaacccagcgagacttcgtcggcgatttcgcccgcctcggggcacgtctcatcggcagcggccggcaccactggcgagcaagcacccggtcgcgacccgccggccttcacaaaacgcggcggtcctgcccttcggccgtccggagcgagggcaagcatcgagtcttcggtcacttctcgccgggttcctcggctctacgctcgcactcattttcgagcgaggaccttgtggtgacccgacatcgagagcggcctcggaaagctcgaggccccggaccctgagctaggctgcccgagacgaccgctcgcgtaacagacgtctctcagagtcagttctctttgccccgcgctcttgctcatgaacgatgctgactagactctgactcgcacaggtacgccggacagcaccaacgaggagaatcgtctcgcctcgtcgtccgcaccgccctcgcggtcgatcaagcggcagcagctgtcgcccagctttggcgatctcgacctaggcgaccatctcgaacatgagcccgttctaggtaagcctttcccgctgttctactgatctttgggttccgctcagtgacatgagatttgaatgcatgttgcccccctgtctctttgctggctggctgttagcgtctgcgagtgaacaggttggcaggttgatctagtacttccgcagagaagtcgcacctgctgtctcctaagctagactactcgtagccgtgcgatgacgctgagccggtcgaaacgtgagtggtcagccctggcggtcagcagcgtcgttggcgatgcacgagcttgagtaagaggctggccctgctgcgccggcaaaggcaagaggccggccggcccgcgcgggcgagccttcttagccgagtcggcccttgtcgtccgcctcctccctctcgaccaccaccctcctctctcccatctacctcactcaatcacacgctgcaaccatgggcaagcaggctatcctcaagcagaacgacagcgacgtcgtcatcgtttcggccgtccggacgcccatcacccgggtccgtctccaccttccctccttgcgtctcacagccgacgctgactccttctctccgtcccttctttgcaggcccggaaaggcggccttaaagacgccctacccgaagaccttctgctcgccgtcttcaaagcgaccctcgaccggtccggcatcgacccaaagctgatcgacgacatcacggtcggtaacgtcctcccgccgggcggaggcgccaacgtcgcacggatggcgatgctccgggctggcatccctaacacgtgagtttccgcgtccccccccccctttgttataggaggctgctcggtagctacggctcacgcttcctcgcgaggtgacgtgggtcgtcggggcttcgacggtcgttgcgggaggctaacacacgctcgccctcgccccgacgcaggaccgccatctgcaccgtcaaccgccagtgctcgtcgggtctccaggccatcgctcaggtccgttgccccccattcgccgacctacgaccgtccacccgaacctcctcacatgcaagcagctgacctccctctctccctccctcgcgccccacccgccgcccagatcgccaacgccatccaggccggccagatctcgatcggtatcggggccggcgtcgagtcaatgacgacgcactatggcgccggcgtcctacccgagaagatgtctgaggacgtcctgagcaaccaggaggcgtcggacgtcctgatcccgatggggtaaggtccttcttcccccctttgccctcggccttcatcacgttcagaacgctgacctcgccttttcccctttcagaatcacgagcgagaacgtcgcaaaggactatggcatcacgcgcgaggagcaggaccgcttcgcggccgagtcgttccgccgggctgagcacgcccagaagcagggctggttcaagggcgaaattgtcccggtcaaggttggtccttccccccccccctttttctctcctcatcctccagtgtgcattgctctcagcggcggctaaaactttgcgcgcgtgcccgaccacagaccgagtgggtcgaccccaagagcgaggagggtaagctgattgtcgtcgaccaggacgacggcatccgcgccgggacgacgtacgagtcgctcgccaagctcaagccggcctttgcaaaggacggcacgacccacgccggtcggtcccgcccctcgccgcatccgcgctggcaatgctctgtttcctcccccccgcacatctcgctgacatcccccgccttcttcccgcgctgcaggcaacgcctcgcaggtctctgacggcgcggctgccgtcctcctcgcccggcgcgacgttgcaaagaagctcggcctgacgatcgttggcaagtttgtcacgtgcgcctacgccggctgcgctccgcgcgtcatggggtgcgtcgtccgggccctcttatcgtccccccctcttcctcctcctctttgctagggctgactcttcgccgcctgcttgtgcgccgctcagcattggaccagcgatcgccattcccaaggcgctcaagctcgcgggcctgacggccgacgacgtcgactttttcgagatcaacgaagcctttgcctcgcaggccgtctactctgtcaaggcgctcaagctcccctttgagaaggtcaacgtccacggcggcgcgatcgccctcggccacccgctcggcgcgaccggcgcgaggcaggtcgcgaccggtctcgggatcgcaaagcggaccggtggcaaggtgtttgtgacgagcatgtgtgtcgggagcgggatgggcctcgccggcgtctttgtcagcgagcagtagacctggctcgccccccttatagtctcttcttccccctccctcttttttgtattgaccgtcgcctttatcatgagcctttgagcgacatcgacggccccccgtgcacctttgcctcgttgtcgcctgagcatcggcatgatctacagggtaagaggggacgaaaaaagggggaggagcagcgaagaacgaaggggaggctaaaggctacatggacggagcagtcgacaacgaagggagggcggtgagagatgagacagacggcaggcagagcaggagatttgtaaggctgcaagagggtgagtatctgagtcgaggcacgacggaaagattcgggttcagggctcggcgaccgagggcgataccgtcccgctcgttcgactgccttggctcgacccaagcgcgccgttcgtcactggcgcctccaaggccgccgccgcccttagtcggtccttgacctgcgcgagcgtgcctgtacgggcccaagtggccgggacgtggtcccactgtcgcttgcgcggcgtcgcgcccgtcggctcgtccggccgcaggcccgtctgctggaacgtcgtcgtcgcgtcgcgcaggccggtgagttcggagctgtggctcgcggcaaaaaccgagagggagctgtcgatctcggatagctgtgggcggaggagggaaggcgagcggcgggagtcagccctggaaggtcggcggaggcgtctgcagagagacataccgcagagatgactgcgactgaggcgctctcgacgtcggcgctggaatcctcgatgccgctcttgaccgactgcagcacctggctgacgccgtcgtgcagcgtcttgagcgcctcccgttgccgcctgagcgacttgtcggcaaggccgcccgcagtcttggtcgacttcgagagggccgtcaattgctgcgaaaccttcgcggactcgtcgtcgatgagcttgaccgcgcactccgtcagggccgagagacctgagacgacgccgtcctcagtcttggacacggcctgtcgagggcaaagagagcagggtcagaagagggcgcttgtggagaggtgctgcagtgcgagcgacgacggacctgagtcagggcggcctggaggctttgaccgaggtctttaatgctctgcgcagcctggaggacccgcttgtcgtcctctctcagccgctcgctgagcgcgcactgcgcggcctcctccgcacgcgcctgctccttcttcttggtcttgacgtcgtcgagcgcggcctggatgttgcggagcgactggtcgtgcgccgcgtgcagggcggccatctcttcatcggcgatgtccatcaactcgtcctggaaggcggccgccgcttcagcctgctgcttctggaaggccgccattcgtttgcggagtgacgagccgagctcgtcccgatgcttcgcaaagtcccgctcgcacgacacgatgagatcggtgatctgcgtgctggcgtctgttaggcgtttgacctgatagtcaagaggacatgggcgcgtcagccgtgatcgtcggcagccagcggagcattaaccgagagacttacatcgtcctcgtcggcgcttcgcattcggttgtccttctcgaagatgaccgtctgtcggggctcatacagctcgtcgatctcgcccgcccgctcctcgaagccgctcagcgcctctgcaacacgacgggtctgtttcggagagagcgaggtaaaagaggtcagcactgtgcagggcattgctcggtgctcgtcggagaactcctcacctcgcccatcgactgtttcaccgaggctcgcagtgatgcctcgtgcgtctccaggccagtcttgacgccagtcgactggccctggacggagccttcgatgctcgaccgcgaggcatcgacctcagcccggtagctcgcgtactctacgtgcgcccgagttaagtacttgccgacctgatccgtcgcctcacctacactcttcgagccggagacgatccccgttgagagatcggtgtggtgctgtggtgtcgagtgagagcaggagcaactcgtctcgtcagtcctcggctgagcaaaggagaggttgcgatctcgacgcacgctcagccgtcgcttcttgaagtcgctcgtctggccgatggcgtgctgatgggcgcccgcctgcgtgtccgcaaaatcgtcaagatggctcgacaagcggccgaccgtggcaagggtcgtagccgcatggctgctgctagacgccgcattcgagctgaggaccgacgccgtccggtctacagaaggagggctacgaggtcagtcgatgctgctcgcatgccgggagcgagatgagccacgccggcgcacccttcttggcaaacagaccagcgaggtcgcccttggcgtcgccgagagcgcccttgtagacgtgagccacgccgtcaagccgctgctcgccgagctcgaactcctcgacgacccggcgctcaatctcgagctcgcgctcaatctcggcgagcgaatcaagcagctgctcgcgctccttcttggtcgccagcaggtcgaccgagacgtccttgagctcggcctggatctgggtcagccggttgttgaggatgacgtgttgcgactttgcctcgtcgatctgagtcgaatggagcttggcgtcctcgttcagctgggcgtagtcctcggccgtgatgtagatgccattcttctctcgtgcagcctgcgacaaggggcaggggcaggagggtggcggaggatcagagcgcgtcgacaaaggtctcgcacaatgacaggccgacgtacgagcagatccttcttgaggccttcaatctcggcgacgtactcgctgatgagcccgttcttggtcatcttctgattgacttcgggccggttcatgatccgggtcgcccgcatcgcatagtcgatcgtcgacagcgtctcctcgaggttggaccgcgagggcgagatggtggcaataatgcgcgtcttggttcgaccgccgagcgagtcttgcagcagacgcgtgagcttcgactcgctgtatggcgtcagacagacatcggggcaagggggtcagctgacggaggttcctgcactcaacaccaggacgaaggcagagacagaccggtacggaatgtgactgctcttcttgacgaggctgttaataacgcggccgagcgtgagcaggctctgattgatcatgccggcctctcgtgcgcgcgtctcgacggcaccggagcggccaatgttctcgcttccggcgagatcgacaaggttgagcttgccgaccttgagcaggtcctcgccggtcgacgacgtctccttgacgtggaccgtgatggagaagatcgagtgcgagcgcgacgaggtcgcgttcatgagcgtctcgcccgtctcgcgccggcccgagccctttcggagcagatcgatgccgccccgggccgagcggacgccgacttcctcgaggccctgaatgacgacgccccggcctttggggttcggatcctcgtagatccggagctcgccgtccttgatcgcgccgccttttgcggccgaggcgacgcccattggctgggcggcggccgatgttgagccgctgtaggtcgccgacagcaggtcgcggatgtcctcattgtagatctcgacaaacgagatcttgacgctcgagtcgcgggcgagagccgagggtgcagcgtcgagcgcggcaaacagccggtggagcgtccgggggacaatgccggcctcggacgacgggtttccgagcgtgttgggcacgaggtcgccctgcatggtgtacctgagggcgagattgagtgaggccggggtcagtcaggtacgtcgggggttctgtcgttttcctgggtggaacgcacgtcttgcccgtgcccgtctggccgtaggcaaagattgtgcaattgtagcccatgaggacctcgtcgagcgtttccttcacaacctcgtcccagagcatgccctggtcggcctcgggtccaaagactttgtcaaacgtgtaggtccgcgtcggcccggccgtcgaagtcggcgctgcgagcagcgagagcgacgacgaggtcgagattggcgacgtctcgactgtcaacgtcgggccgatcgcgccggctgtcgagacgataatgggcgagttctcggcaatctccttgctcgaccggccgctgcgcaaggagagacaaggatgtcagcaccaaagagggtgcgagggcgagcaacgaggggcgtagaggagacgcaccgacaccggacgacgacctcgatgtttgtcccatccaccgccgcagcctttccatcctggagctcagcctgcgaactcgcctcgccgagcccttcgcgctgctggagctgcttgtcgctgttactcatcgggacggagccaccggtcggcacccgctcgcgcctgacgccgcccgtcggaggtcctccagcggccgccttgccgcttaccgtccgaccgccaaacggcgctggccgagcgttctcctcgtcgccatgatgggcggtggtgacgccgtgggttgcgcgtcggctcgaaacggaggcggaggcggaggcggcagacgaggacgttgcgagtgctgagctcgacggcacgcgcgagagcttggccgatgactgggcggtcgacggccggagcacggccgacgaagcgggtcgcgtgcggcgcggcaagggagccgacatagctgagggggcgagagaggttgctgtcctggcgagctgtgaaagggtggcgcagaagagggagtgagaaggagcggcacgctggttgttgaccgacagcttcgtcgtcgatgccgtcgcagacgcgcggccgtcgaccgcgcgaacgccgcgaaggccagacgcgcggcgcgtctcccctgttttacgcctggcgtaactcgaccagcgtaactcctacagtgctcgacgcgttccgaccgcctgctcctccaactggctcttgaccctcgtccttcgcccgcacctcctctctctcatagacgacagcatgacgactcagtacgacaacagtacgtcccggcgcggcatctaggcctttgaaccgcgcgcgagtctgttagccgctgatgccctcatccgttcctcctagtcttcctcgcgagcacgccacgggagggccgtacgtcccttcgcctgccgctggccctgcttcgacttgctgcctgctgtcggctgactctcgccctcaccgatacgcaggcctccgtctcgctgaggcgtccggactgggctggaagtcgtacgacaaggacgagcccgaagccaacgtcgtcatgctgcctaaggacgagatcaagtgggcgctctggacgcggtcagtcccgtccgcccaactcggcagctctcggcgggaggtctagctgggagactggccttcgcagctcgtctgcggccctcggcaggcgctgcgaactgtcgcagcgctttgggctggaggtaatcaagaattcgccgctcttccggctccggcttcgaccgccagctctgcccgctacagctccagctaagctcccggacgcttcaactctagctttctctggattgagccccgacccccgttgaacacagcactgatactctcgtacctccccggtgctgccctgtcagagtcgcgcgaaacttccaggtctgcatcggccagaagaagtccgaggagcgactcgtctttgagaacttccaccgcgacgtgcgttccctcccctgcctcgagcgtggccttcgaaatcatgcgttgcggcctgctggacgcaatgcgccgacagacgtcatgactgccgggccgcacggtacccttggcagcccagacctgccggccttcctcggacgagagctgatccccacccgccgccgccgttccgccacgcaggacttcgacccgctgaacaagatcttcaaggtctggggccacgagctcgaggccaaggagacgtcgctccgcggctggaactggggtcaggtcgacgtccagggcccgaacctcgccttcctcgtcaaccagaaacagtcgttcctcctgccgctcgcctcgatcgcaaactcaaacatcgcgtcaaagaccgaggtctcgctcgagattgcgccgccggccaagggcgagggctccaaggctgccgccggaagcaaggccaggccgttcgacgagctcgtcgagatgcgcttccacgtgccgggcatgacgggcaccggctcggacgacgacgagagtgacgacgagcgggccgagggcgaggagcgcgtctcgaaagctcaggccttccacgagatgatcaaggagcgagccgatatcggcgacgtcggcacgcccggcgtcgttgtcttcaacgaggtcctcgtcctcacgcctcggtgcgtctcctgctggcgggccgcttcgctgtcggccgctctcgctgatctccttccgctctgccactctgcagtggccggtacgacgtcgacatgtttctcacgcacttccgcctccgcggcaagacgtacgactacaagattctgcacacgtcggtcacccggctctttctcctgcccaaggccgacgagatccacgtccagctcgtcgtcgggctcgacccgccgatccggcagggccagacgcggtacccttacctcgtcatgcagttcaccaaggacgaggagatggacgccgaactcaacttgagcgagtgcgtgccgttccgaccgggctttgcttgagggttcctcgctgacttgcccgtcccgtccacgcagagaggagcttgacaagcacgcgctcaagcggacttacgaggcgccggcctaccaggtcgtctcgcaggtgttcaaggcgctcaccggtcgcaagattaccccgccctcatccttcatctcgtgcgtgccgtgtcgcgctcgccctcctcgccaccaaggctgaccccgcatcgaccgcttgccgcaggaccttgggccagaacgtcgtcaagtgcaacctaaaggccaaccagggcgaactctacctgctcgagaaggccatgatcttcatcgcccggcagccgctgctcgtcgacttcgccaacatccagacggtctcgttctcgcggtgagtcgtgccccttcttctgtctttttttagagctgcgtcactgatgccaagccatcctccagcgtcggcggcaacatggcctcgtccaaaacgtttgacctctcgatctcgctcaaggcccggaccgacggcggatccgactacagctttacgtcgctcccgaaggacgacgccgggccaatcaaggccttcctcgaggcccgcaaggtccgcgtcaaggacaagacggaggaggacctcgctgccgtcctgagcgacgccgacgatgacatgagcgaggaggaggaggaggacagcgacgcgagcgccgacgccggcggcaagaagaagaaggcgagcaagggcaaggagcgcgagagcaaggcggtcgctgtcactggcgccgacctcgacgacgacgacgacgagtctggtgcgtcgaccggacggaccttttcctgagactcgccggcttgctgacctgctcgtctccctcctctctcagacgacgaggacttccaggcgtcgtcgtcggatggcggctcggcatcgtcatcatcagacgaaggcggttcggacgcggacggcgacgtccagatgaaatcggccgacaagccaaagaagaagaagaagtcagccgaggatgggccggcaaagaagaaggccaaggttgccgacgacgcctgatctttgtcactctctttccctccttacgacttacgccccactctcttgcaaccttgcgccatcgcttctgtaccagtctccctctcttctacatgcgctgtcctgtctgatgcatctcatcgcaaaggcctactctgccgcgctaccttactctgccgcactttcctcgcttgagtcctcctcgacctcggaatcgctcactggggctgacgcgctgcactcgcgcagcgcaggcaggccgccacttgtgcgtcggggcaggagtcatgcaagaggggacgagacagagagagagagagcgtagagagcgcccgacgacatgcaaggccagacaggaggagagcagcaaaacgatatgaacggacgacgacaagagacggacgacgtcgtcaagagtccaggatggccgactctagcactcctggaagggcgagcagaggcaggatgccgtaaagggtcagtcgagcctcggctagcaagcccctcgaggaaccgctaggacgcaccgtccgtccgcgcagatgccgcatccaggcgcgagtcttccaattgtgcgcgtagaggtcgaccatgtcctgcgcgtaccggtgacgaggctctcgtcagtgcaagttacagtcagccgaggggaggggtagggactcacctggagcgcgaaccgggtccgcgtcgagagcttgccgttgccagcgaggaccttcatccgctcagccgccgccttgacgtccgcccttcccgcgtcgtcctcatgcatgagcctccggccagcgagctcgaaaacctcgcacgcggcgaagtactcggcctgcgtcggctcgggcgtgtggagcaggaggtggaggagctcgaggaggatcgtggatgagacgagcgtggcgtcgagggcgtacaggtggcaaaggaagatggcgagcgaggggagtcggccgtcgacctggcgcgagtggacgttccagtgcgacgacggccgagcgtttgcttggccggcgaggggcgggaagaccttgtcggcgagacaggtgagtgagggctggatcgcaaagagcagtgtggccgagacggcagtcggcttccctcgcttgaccgccgtctggtgaacgacgacgaggagtgtcgcggccgaccgacttgcggtccgcgccgcgctctggccggccgtcaggggcgccgtggcgtgctcgaaggccgtcttgacgaagcgctcgaggggcaggcgtttgttgccagtcgggtcggcgagggcgcggacgatgtagtcggagaggagctgggcgtctttgacgatggagaggggcgtcgtccggttgaggagcaggcggtagaatgcctctaggtcggccgcagaagcagggggggcttccctcagtccctggcccgcccggcgcgagacccagcgcttgacgaccggcccgttcgctcccgagaagggcgccgcaagggctgccgagtcggtgcaccgggccggcgaggtgaacgcgaacgaatcgaggtgcgaggccgagctcgaggtcgagagcgacgggagagagattgagctggccgagtcagactttgggagtggcgaggggtcgacgggcgtctgacgcaataggagcgcgagagcgtcagcggaataaaagggcgtctgcggttcatgacgctcacgaacctcggctagtgctggcgtcagcagcggaaggacgtcctgcaggcctttgaaatcgccgagcgcgagcttttggaggacggcgccgtgaatctgccaagagggcaagtgggcagctgatcagcgtaggcagcggaagagttgagcgacaagggacgaccgacccccccgagggcgacgagcatctcaagcgccgccgcgtggtcctcaaccgactctatctggaccacctcggcgcacgcgacaaagtcctgcaggtcggcgcgagacgttcgccggtcagcttttgagcgcaaaatttagcggattgaggagcaagaggacagacccttgcgagacgctggcattcgcggaggaagacgctcgatcgggcggtcgtcgcgacgcgctgagcgacgccgacggcgatgggctggagtggcggtttgcccctgacggtgcactcggctgggggagacgtggcagtgtgaagcggggagcgtagagctgggggaggaatcggcgctactgcggatggcggttgctgaacttggaggatcggtggcgaggccgagcagaggcggacgagtggcgctgtcttcgtcggcgtgggaggactcgcgctcgggttgaccgacggagggaggtcgctgttgttgttcgagcggtaggattgtggcaccgagacgggcggccaagggagagatcggccgacttggatgtaggggacttggggctgaggaggaaggtagaagagtgggcgagcgacgagcggcgcattgtggttcggctgatggggttcgagcctgccgttgatcgagcttgcgaaaggcgcccaggctgggccgagcggatgcgaaggaggcaggccggtttgccagctggccggacgcgagtgcgggcgggcgaagggcggaggggtgtggtaggtcggctggtgctggtgctggtcctggtcctggtgcgagggttgtcggctgcgagcaggctgcagttgttggggttgagggcccggctgagagtaggcgcggcggaacggagaaggagaaggagcttgaagggcggcagtcggccggtgctgctctgggacaggccaacacgccccgttcgtccaaggcgcgagggggtcgtcgtcgagcagcccaagcgggatgagccttctctgtcccgaccggcagacggctttcccctcgtcggcctccgcggcgtcggcgttgttggaagggggcgagcccggccggccggtcgtgtagaagatgccgggcgggaaatggccgttaaagcggtcggcggcggcgaggcgcgggctcgagctgggaaataaaggcgaggggggtgtgagggcggtcagcaggggcgggtgagagagggcagcacccaggggacgcacgagcttctgcgagtcgtcgtcgacggtgatggcggtgatgtcggcccgcatagcgcagtactcgtggatgggcgactggacatagcggccaaggccgacgcagtaccgggcgttctgcggcatggccgggaactccttcttggcgcgttccgagtgctggtagagccgggcggttgcgtcggggacgtagatgactgggagcgttgcctcggcgagctcgcgctcgcgctcgtccgaggagacctccgccgcgccgccccaaccgttgcctgcctgatcgtccttgggctggttgttgaccttctcctgggcgagctcgccgacgagagcgcgcacccggttgtaaacgcggtcgtgcgtcgagacggtgaagccgccgacgacgatgcacgccggctgccgcttctggacaaacgccttgaaggcgtccgttgggtggaccttgccggcctcgggcgtgaagatgccgcggtcgacctcaaactgcttgtcgcggaggtggtcgaccttgattgtctcgcggatccggccttgctcgtcgataaagacgcacatgacggcgtcgtgcttgaagtcgccccggccgtggctgacggccatgacggacggcgacgagcccttctcgtactccttgggccgatacggcgcctggttggcggcctgcgttagagaaaggaaagcaggggtcaggaatgagctcgccaccgagaggtctggtaagacgactagcctaccttctcgagcagctcgccgcaggagccggcgacaaagtcctcgacctcgtcccgaagccactccttgacccagcgctcgcccatcgggacgagctcgttgcggagggcgagcttgacgttatgcgagcgccaatcgttccatgcgtgcggaacctcgccttcgccggctgaggtgaaggcctcgatgatcccttgctcgagccggtcctgcacctgggtcgggagggagaagcggatcgagacgagcgtgtccttctcggcctcgagatagtgcaggaagcgggccgactgggcgagctcggcaacctgcttgttcttgaggtacttgaaagactggcagcgaccaacgagaggtcagcggcggagcacgagagcaggagggaggagagccagcgagacgtacaaagtaggggtggaactcgtcgatcttagcgaggcccttctcggtcggccggatggtgagcaggccctgctcgcggaacgactggcgcacgatctggcggagcgttgggttggtggcaaggtcagcgacctggagcatgcgcagccctgttaggggggagcgttggccagacgtcagccgcggcgatgaagtaagcacaggacgcaagcctgacgcacccttgaggacgtcctcagtgctgctgaagtggcggccgtcaacgtaggcctcggcccactcgtccggcggcagatcgggatcctcctgcgtcgccgtcggcggctggaagaggttcttggcgatggcctcctcgggcgagatgcccatgttctgcgaggcagagagcgacgacagggacgacaaggcgggtcagcagccgtcaacggcacgcgagtcgagcagaagatggactcacgcggagagcggtgccggcctgaccctcgcggagctcggccgcgcgcttgatcgcgccctcgttggtccgcttctggcgacgctcgccgcgagccttcatctcctcgtcctcctcctcgcgcatttcgcgcagctcgcggccccagcggaggccgacccactccatcgcgtccaagactccctcgacaccctcctcggcgagcccgcccgagccgtcgatcttttcggtgtagtagaggtcaaagacgcccggggccgggccgtccagagcgggcgggatctcggcgccggcatcgtcgaccgtgacgtcctggtcgaccagccaggccgccttcttgcgcgcagagagcttggaccaggttaggtcgagcgcgtccttgcgcttcatcagcgagcggtacttggtgccgagctcgtagaccttccagagctcgttgcgctcgagtaggcggacgaggccgctcccgctgtcggtcgccaagggcgcgttgccctgctcgtccttgcggtagtggacgatgtagtcgcggcggtgctcccagacgaagggcacctcgaggtgctcgacaaagaggtacgtcaggacgcgctggatggcctcgacaaagtgcctgtggaggttctcctcggccgactggaggccggcgctggcgtacgagtcgagcttgggcgcgaggaaggccttggtccgggccgagatccgcggcgcgatccagacggcggcgctctcgaccggcgggaaggccgggaacggctcggggatataagtcgggttggccgagagggtcgagttgaggagctgatggcgttcggggatgtcgcgagcgcggatcaggtcgtcctcctccgtcaggaagcgggccttgatctcggccggctcgaagatctgcgagaaggcagggcgcgcaggtcagcgagaagcctgtcgagggtgagcggtcaaaccaaaggggacgacgcacgtccgaaatcttgggcgcctcgccgtcgccggccgcgccaaacatctcgtcctctccttcgagcgcccagtcgtactcgtcgccgttgccaaagacctcgtagatgtcgtcccaggtcctgcggcgggggacggcagatggtcagcagcggtcgcggcatggtcgaagttgaaggcagagcagagacgcacgacttggagatgccgccgtcgccctccttgcggcccttgccgccctgcttcttcttctttcggcgctccctctcctggcgcttgcgctcgcgcttctcctcctcgtcctcgccctcgcgctcgtcctcctcgatgaaatcggcgaggtcgtcctcgtcgtcgtcatcctcgtcctcgtcgccgcgccgcggacggtcgtcgaagatgcgcttgaggtcgcttgcgtcgaggtccttctcgcgctcgccgccgctctcgttgtcatccgaggcctcgccggcgccagagtcgtccgagcccgacaggtcggaccgcttccggcgaaggagcttctttttgctcgccttcttgggcgcggcagccttcgacggccgcacgaaagcgcccgtgttctcggcgagcaggtcgaggtcgtcctcggacagcgcatccgagtcgccggaatcccgggcttcgctcgcttctgagggtagggagggaacgggagccagaggcgggtcagcttgtcgctctaggtgtaaggagccctcagcgaagcgtcgtcctgttgttgagaatggacgcaagcggagcattgaagcagccgcccgcgagcgagctcgaccatcggcaccggccagatcccagacctatcactctcacaggttcactctcccacaagttgcaacgggagtgggtccgccacacttaaagcaaccccgacacacaggcagcgcaggaagtcaagaaagagcgggactgacggcgtctcttgcgcttcttctccttcctctcgcgcttctccttcttgcgccgggcgcgccgctgcgagctcgtctcctcggcgtcatcatcgccgtcctcagactcctcgtcgtcatcgccctcgacgatgaagccgtcggctatccgccgggcctacaacagggtaagggagcgcgaagcagaggagagaggtcagcaccctggactgcgagagcagacacgaggcgcgaccgaggtcgacggctcgtccggaagagaccgaggtcggccgacttccgacatgcaagccaaagcagcacagagcgctaggactgacctcttcctcatcgtcgtcctcctcctcgctcgagtcgtcgccggcggcttgccgacccttgcccgtcttgcgctctgccgagatgtcgacgccgtcgtcgtcctcctcttcctcggccgaggatgaggtccgctctgcgtcagacattccttctgtttgagttggcgtgggtcctcctgctggacgcgtagaggagacggcaggaaagaatatagggcggcggcgggagccgagagggattgatggcggtaaggaggggccgctgagagctgggctgggctggacgaggtcgggcgaggcggcgcgagggggagcaggctccccgtacgcctgcatcggccggacccgcgtgtctgcatatagtcccctcagtgaggttgccctgaccgccctcttcccggctcacattccaacaggactttgtcaagggagacgtcatgatacaacgagaacggcatgagatagccggtctagcgagcggcgacggtcggcaggacggcaacgtcggccgacggctcggtcgcagcagccttgccgtcttccttgctgtcgaccgcctcctcgtcgtcctcgtcgagcgtcttggcacctgttggcggggcgtagtcgtcggcccggcggatggtctcggcgaggttgtagggcttgatgtgacgctcggcgagccaatagatgccgccgcaaaggacgaggacgaggatccagaggccgatgcagatttgccagccgtacttgtctgcagggcgattagtatgtcaggaaaaaggcgcgagagaggggcaggggagctaagcggaacgcacagtgaggagcctggtcggcaggccactgaagcgggtcctcccaggcggcaaagacgtactgcaaggccgaggcgcaagtcatttgtcagtctagagtcgatgcagtaggaagcaggcagacttacgtagaaggtgatggagataccgagaatcaaggcacgcaattctgcgtcgtgcgggaggaggtccgacagccaggtgaagatggcgggcgtcgtcgactggagggcgtattgcgcaaagtaggagaagtacttgaggcccagcggcaccgtccagacggtcatgatgatggacgggattaagccgagaatggcggcgcccgcgacaaccggccaccgtatcatgaagtggtccatcaggagaccaagaacccagacgacagcgacgttgactggcaaggcgcaggacggttagcaggacgaaggccaaccagcaacgcgagcccagccagccacgagacgcactcgcactgccgattgtcggtatcaagtttgtcgcgctgaccgaccagacccgcgagccatcctcgcggacgagggtcttgaggaagactgtaaagtagtacgaggccgaagtggcgagcagagtcgatacgtagcagcaaggcagaatgatcgcgagcgcaacgtgagccttgttgccggccaagtcctttactgtctgccagcggaacggcttgttgacggctcggttgtgccgccttgcccgctcgagaccaagctcggcatgccgagggcggagccagaaggacgccagcgggttgggcttgacagggctgcagaggacgacacggtcaggtccctccgctgcaaggccgcgaggaggaccaacgcactagtctgggatgcagacgaaaccgagcgccgcgacggcaatcgtcatgatgcagttgatgatgctgaaggagtgcgcagttgatgatagcgaggtcagtcagggctcgaaagcttcgaagcaaggctggctacgcacaagagccagcgccaggcagggataccatgagcgttgccgaacgtttcgacgatcgcagcctgcaggacaccggagagcagagagccgacagctgctcgaaaaggaaagcggtcagtcctcttgcgaaccgtccaactggtagcgatcgaagcgcaccctgagccgagtggtagaacgacagtcgcttggcgagttcctgatgtgagtgcaggcgtgatcaatacaggctccagcgggtcgagagcgagagtgggacaaaccatcggcgtgtaccaagctgccccacaaatgcggtcgagcaatctgatggttagagacaaagtgacgaacagttcgacccgggcggccgacaagacgcactcatgagcaggacggccgtgcccgggtaggctgatgcctcgcagaggccgatgaggaaccgcatcgcatagatggtttcggcgtttcgcgcgagagcaagcatgccggtgaatagaccccagacgagctcaagggtcggcagccagattgaggggcggacgtaagtgatgatgatctgagaggggatcagcatcagaacgtagccgatctgcagcgtgaagagagcgggtgggtcagggttacaagattgtgtccgtctgtcctcaaggtaaagggtaacgcacgctaaagaaggtcgaaaagtagttgagctccttgccgtagagagcgagatcctccctcatgccgctaacgtaggcgtttcttatattggtttggtcaatactgcgcaagagagcgtatggtcggtcagcatgaaggacttcaggtcagggcaagggtccagggtcgtatgagccgaagggaggaatataaccacaatttaatgacctgactgacgcagccataaaacaagaggaagaggtcgagtcgccagacgaaggcgcgctcctccttggactgcttgccgaggacgggctgctcgttgaggatgatgccgtcgacctcgacaggctcgtcggtcgccccgtcggcgatcgccgctgacggcggcacggcctttttcttgaagagcactacaaggggcaggccaggggcgtcagcgagctactcgcctacattagatgtagttctgacatactgtgagcagggtagcttgcggtgtagagtcgtgtgaggatggaggcggtaagctgggtttgaggaggagggaagagcgccgtcggccgatgggcccgcgagctctgcctttagacggctggacgccccgcacctgctactctctctgcgtggtctttccgagcggggcgggtgtcgatccgagctgagattccagtcgtaaaagcgagccaacgaaaaccatggggccggcgtcgggagccgacttctgctcggcggctcggcggtatcagcgaagcgcccgcggccggcctctcagctccccagcttgagccaccgaggcccccactgtgcgacactcgtacccttaccgacggggtcagcggtaggagaagcaacgagataaatagtcgtacaatcaacagtgagcgagcggtacatcggcctagggcgatgcctgatcaaagcgccgaggggcggacgacggtccactgccccgggcgaggctccttgatctcgacgccctcgcgccgcaagagctcgaccttctcctcgatgagggcgccggttgtcgaccccttgaagccgcccatccttccgtctgcggcgaccacgcggtggcacgggatgagcgggcagaacgggttcttcgcgagggccgagccgactgctctggccgagccgccgatgtttgctacgagcgcgccgtacgaggtcgtcgtcccggccggcagctgcgagagcgcgaccttgagatcagcgttccgttcatcctgcctctcgcgcgacgacgtacgtccttgattgcgtcgtagactcgccactggtaaggcgtgagaggtcgctgggtcgccgggtctcggtaggccgagcgggcgagcaccgtcgtcgggtagcagacgccggtggcagcttggccggtagcgagcgacgagagggaccggctcgaggccggcgtcttgaatttgggcatcgcgagtgttcgacaaggcaaagagggttctgacaggagctggtggttgaggaagggaagggaaagcgtctgtcgacgcgccaccggcatgctgcccgacagggcgagtcgtactcgggtaggccgtcgatggatggcccttctctcgcagatgtcgcacgcaaagctccctggtctatactggcgctagctcggccacgagatgtctctaccccttgagagtcagaagggcagggcgaccgcttctcgtcggtctgttgagccgggtcgctgcggctgctgctgcgcccggtctgtcgacctcgcactctcctcctcgacctcgaactccttcttccctcccaagccctgcctgtcttcgcatagctctctcgtcgagcttcttatcgtgtcgaacatgcgactgattcgtagccgctacagcctggccccatcaaggcgcgcggtcagcccttcccacagccggtgcgtcgactccctgtcaatttagacctcgcgtcctcgccggctgccctgacgcttgaacagaccggccttcgtctgggcaacaaacggtcacgcttcctgatgctttcggactgtacagaagcctgctcctctacagattcagctgtgcgtttgctgctccgcgcatccaaaggctacaaggctgtcgtcgtgttgcgctgacaggcttcccatctcttacctgctgcccgccagtgactccagcacgcatacgtagcccgctggcccgagcacctagcacaaatacaggctctcagccttatcaagagtgggccctcagtcattggtcggacgagcgctcgaccaggagagtacgcaagtccgaccctctcttcttcggccgccttctttcgctgcgtcgagtctgacggccagctcacagaccactcttagcttactccttcaaaagcctctatcgttcgactcatccgtacagtagcgtcgaaggcgccgacccttgagccgttctctctcacgcttgacccacttaaccgggtctcgtcgacggcgctcgtgcgcagatgtcggctctcctttcccctcaaaccgaatctccttccgtacgggcagtcctacctgtcgcgtccatctgaaggtcgactgactcaagcttctccttggcgatggtcagggcagatgcgctgtggacgagaaggagcatttgcgccgcacgacttgcgctgccgttgaccatcggcgcgactcgtttgaggtcccccggcgtccggccagcataattgagcaggactggttgcgcgggcgcagccggcttagataactagtggcaaaagcagcaaggacgatgggcaacaaggacgacgaagcggttgagaagacggcaggacgaacggcacggccaggtcggacggtcggtcgtctcgcactttccttcctgctctgacgtcccgtctactgaccctcgttcgactcttcccaggcaagattcaatctgattacggtcaaagtgcggacctcgcacggccccctcgggggccttgttacgtctcttttctgcccctcctcctccagcttgacctcctcgctgaccatttctgacgaccgtgtccatccaccccttcctcccgttcctctccatttgttccggccgagactgagcccgttcaaggtatgtccaccctgcgctttacctcgcgattctgtctgcgcaccgactgactttgcctaggccctctttgctctgccttcttccgacgggcctccctcgttacacgccttcccagcgagcggtcagtcttctcgtctgctcgctcgaccttgcgaccttactctgaccctcccgttggcgacgctccttcctctctcatccgcaacgccgtcctcgccttcgaccgtcgcccgtcgtcatctcatctcggcccccctcgtttcggcgggcgcttcgactggcccgttgccgcccgctcctctcgtctcggtctcgctacggtctcgctcgtgcgctcgcctctctctctctctctttcgtgctctctctcgtcggcgactgctgttggatgtctcctttctcctcgtccttggctctgagctgtcttgtcgtcgagagtgtcgtgtctgaggaaaggactgcctgcggcgtctgagtctcacgtgcacccccttcgctcaccttgtgcgtacgtctcgccggcgcagcggacccggcgagcagcagtgtgctgggcacctgagttggtagacatgcgactggatacaagcagaaagcagcgggagaggactacaacggttgatggcgagaggtggcgcgccttgggagacggacgctacatgaaggcaagctcgcagccctgggagcgggcaaacgcgcgccagtcggccggctcgcggccggtcacgtcgatgtgctcccagtaaagctcaatcatcctgtgattatcgacgtacgctttggccgagccgcagctctcgagctcctcgcggcacgcctgccggtcttgagggagggcgacgagactggcgacaaagcaggggaacgctttcgagatgccgctcgcgaagcgggcttcgtccgtcggggccctcatttgcgccaggaggtcaaggatctggtgaagcgactgctggatgagcgcagagagcccgccgacgcctcggaccatctggtagagaaagatgagggcggcctgcgagtaccgatgaggtcagcatcaatccctgcgaaggtgtcgaggaagagcggtcgacaaacgtgtctccagacctcgcaggacgaggcgtgctcgatgtaagcaatgctgttagccatctggctgaaatgatcggtcgacggcctccacgcccgaatgcgagtctcgaggtcggtcgcctggagcttgacctcggccgccggaagtgtttgccgtcgaccggcgaggtcgttcgtttgcgcgaggatgaagatcaactcggtcggtaggccgagaaagagcttcagcggttgcgccgacgcactcgacggcgggggcggggcagacagcgcctcagctgctttcgaggccgccgcatcgttatcgtcaatcgagtgggagagctggaagaaggtgtggggccggccttgggcgatggaccgaaagatggcgacgtgagcgaggatggcgagcgtgtagtacgcggggctcggcgaggagcagaggttgaagcgcggggccgggccaagggcggcagtcattgtcgcctcagccctgtcgttccataggaaggcggccttcgccccttcttcggcaaaggagaagtctgcagcgcggcgactgtgtcagacgcggttctactgcggcagtgaggcgcaatagactgacagtaaaggtcgctgaaagtcaggagctcgtgggcgaacggcacctttgtgcgcgagacgagggcgatcgtcttgcgctggtaaagccgcatcatgtcggcgatcgagtccttctgcgcctggttgaagcgctcctggccgtggcagtagagaagggcgcacatcgtgctggccgccttggtgagcgggacgtcgccacaaatctcggtccagtagcgaaggacctcctggacgacctcggtcgggaggtacttgcagaactgggcgttccaagagacgttgtagacctcggcgacgcccttctcaacgccgaccgacctgagcacgagcgcgccttcaaagtgggcgtcacgctcaatctcctcaggcaggggcgtgaccggtgccgagagcgagtcggccgcgaaaccctgcgacgccaggagcgcctcaaactcggggaaggaggccagaaagtcgaggttcgaccaatcgggcgaaggcgcgaacggagttgtcggccggaagccgaccgagtcgaccgcagcgggtcggatgctggccgacagggcggatgcgactggagtggcgagctcgacacctgggcctggcaggggcgagagtgcgactgggagtgtgagagagacgggaagtggctgagagcgtgatggtcctgctatgggcccctcgcagacgctagcgatcggtcgcgccgacgcctggccgcccgagatgccgagtgccccagctcgctcgaccacgggcggctgtatcgccggagctgccgaccgaggcggtggcggcgaggtagagtcggcctggctgctgcttgacgccgtcggcggccggacggaacattggcttgagccgtcggctgccgccgccttgcgctgcgctcgacgggcgacgatgtcggtcaggacgggccgccggcaaaggaagttgctcgtcacgcagcgagcgcacgagccatccgaattccatagctcgtcgcactacatcccccggaaggcctatcagctatgagagggtctagctgaaggctgagtcggagcacgacggaccttcttacggcgagttcggcagctagacgttgggcaagaggagcgagctggtcagccttcaggtcgtcgagagaaatagaaaagcagagcacagcggaaaccgacctgatacagccagagcgtgagcgagcgttttcgggggccattctaggaaggtcggttgagcgagagaggagctaggggtcgtgtcggcggagggggggggtcggggtgaaagcgagccgaggtcgtccgttgttcgaacgtcgcgatcagccagtcgcatcggccaagcttgggactgctgagaacgacgaggtccgagctgctgctgctgctgctcttgctcttgattatgagctggacggtggtggctgcttgcaggcaggccggtcggagattgcagccgtcggctctctcgccagtcgtcgggcgcagcagccgcggcagccttcgaccctctttgacgcctctgccagccgacgcctgcagacgctcactcgaccgaagacattaggatagagacgatggggctgaataaggtaagggttgcgagccggcgaggttgagacgcaggaagtgtgaaagggggaggacaacgtgcacctccagcacgcgcctccagacaaatcgccggcccctccttctcctgcggggggatgcttctagttctctgaacctgccttccggccctcgttccgcgagctcggccggctgatgggcgcactcccgagtccagccgggcctatcggcgggaactgcagactcgagctcggcggcgagagcgagcgcaggtgcgccttgctgctgctgctggccccggccgaggacggcggcgctggcgtcgtcgaccgtgacggcgcagccgagccaggtagcaacgaggatgggccggtcgcagacgatgacgaggcggcggcgaggagcgaggtcgcgccctcttcgagcttgcggatctccgagtcgagcgactcgtgctcgtcctcgtcgtcgtcgccggccgtgtcgacgccgtttcgcgggtctaatgcgcgcaagtggcacgtcagcgaatgcaagaaaagagtaaggagagcctgtactcacggtcgacgagatcatactcctcgaagcggccgacgcctccgctctcccactctttgagctcggccggcatgaaaaagtagaagcagaaggtggcgaggcagcctccagcgacgaggtcgatcaggtagtggtgcgtgaggtacatagtcgactgcaggggagggcaggtcagtcgtgggggtctcaggcgagagcaggaaggccgacgccgccagcagaacgcacccagtagaggacggcgacgtaagcccagtaggccggccggaagcgggggaaaaagtagctgagaaagagggcctccatcgtcgcgctgccagaatgcaggctcgggaaggcgccaaacgggatcggcgcgttggagaacgtgacagtgtagccattgccgccaaagatggcgtcgatgcgcgagagaccgccggccgagcccttcatgccatagtaggcgggcgtcaggccgtggatcagctcgtaccctggtcaggggcggcagttgatgcggagtcagccagatgataagaagggggagcctcgtacgagctgaaaacacacagggcggcgtgcagggcaggatgatctgcgttatgacgccgagcaggttcatcagaccaaaagccttgccccagaaattgatcgacccgcgcgggccaaagacgaaggcgacggcggcgatgacgaaggggatgataaagtggaggacgccgtacgggagccaggcgagaatgtcgagcaccgggtgcgtgtagcgcgttaagatgtccgagatgttctgtggcacgaaggcagtgagcgaatcgaggaagtcgtcagcccaggtcgaggggagttggagttcgaggaagagcgacgcacggcgccgtagaggacgctctcaagcgtcggcaagagtgcgacatggaccgccggccgccacgagacggggatgtccttggacgagaaaaagaggaggacccaggcgaggacataggtgcccggaacaaagaactggccgaggaaggggacgagcgtgatgaaggcgtagccggccgggatcaggagcttgacgagcggcgggctcttcatcacgtagaggaggaaggtcgcctcgagtacgaggaggatccagccatagtcggtccggagcgaccaccggcgccgccggagcttccggatcgtcaccgccggcgaaagggtgaggtcgagccggcgaagcgcgttgaagatgttggcaaagaggtagcggatgaaggcggccggcgagcggccctgcatcgggatgacggagctcggtgcggccgtagaggcgacggaggtggccatggtgggcagaggtgacagtcgttggctcgtcacggcaaatctagggaagcaggtgcgtgaggaaggacgcgtcgctggtcttgaggagacggggaggaaggcggtcaagggacgcgagccgggggtgagcttggccgagcgagagcttagctcgggcggagagggcttgggcctagcgacaagggaaggagcgcgagcgagcctattggaccagctggaaccggattggggcgaggaagaggtccgaggcgtggatgagaggcggggagtctatgtcggcgtcgaggaggacgaggagaggaggccgggcgcgtttcgagctggcgacgcgcgccgcgaagcagcagcagcagcagcgagacgcgaaggagggcactctcaacgagcacacacaggacggcagtcgcagaccgctaagggggcaagggcagggcgagcgagagacacacttccgttcgacgcccgagcaccagccggcaagagatgagggtcatgatctgacctcgccggcctcagccagaacctcggtgcactcgcgctcgacggactctgcgcctttcacccccgactcgacccacttggccagcactggccgtttggcctcccatgatgtgcgagcctcgtctgtccgacctgggcgccgaagaacagtatgaggtgaagggaggtcagcgcgcagcagtggggggaacgtcgcggtcaacgtccaacctcggccgacgcaccgagcagaagcaagtccgagagatgctgcggcagctcggcaatctctctcgtcaagagcgacacttcgatcgtttgtgctggagtggaagacgaggccgtcgcagaggctgacggcgtcgggagcgagaggctctcgacgagctgcgaaatggtcgaccaggcgtcccgaagcgagtcgagcgagtcggacagaggcgaagtcgaggcattcatctatagaaggactcccagcgtcagcagacaaggcattcggtcgagtcgccccatgtcttgcacgccggcgggacgtacgcgctggatcgtcgaggaggcagcgacgaggtcgtgatgccggccgtagatgagatcatgcttctcctgatcgagctgcctgatctctgatcagcagcagcaacaagcaacacaaccgagcgatcagtagctgatgaaagggggggagacgatgcgtcgagacgcacccttggcaagctcggcctggaccttcagcaggtcggcgagcgacgaccgctcgatcaggtcctgatagtagagcttcgggttgaagttcggtgagtctgcatcgttacaggcacgctagtcagccagaggaggacgacctaagacgctcaaaacagcacgcaccgaggtccatcgcgccccggctgtcgcggtcgcccttggtcggcgtcgcccccgcagcagcagcaccgccggctgaagccatcccagaagccctcctcggggcggacgacggcggctgcgaccttgaactgccggctacagcagaagatgtcgagccctgtcggactgaaggcctcggcgtcgagggaggggagcgcgtcgtcgaggtcatggcggtttgaggtttggcgagaggagcacgacctgctcgtccttccgcctcccgacaccatctcgcccttcctgccactctccgcgaggtctacgcagctcagacacgatttagctcagcaaggcttcatctgccaaacgctccgctcgctcgatggtctcgccactccccgttgaggcagctctgacgctgcccctgccgaccgcgcgcatccagaccgaggccgacctcgcccacttcctacgttcgcccggctgcaccggctacctggcctggctccagcagctctcttcgaagctcatcggaacgacgctaacaacggctgccgagcgctcttctcgccactcgtccgaggtttgttgtcgtttcgtctctgcgcatgttaagagagtcaatgctgacacgagtacgcctggcacgtgcccacctcgttccccaggccgtacagcagctgaggaacctcctggagaccctcggccagtccatcgcagaccacccgccgtcgaccgactcacagcggtacggcaacctctccttccgcccttggtcggccgccgcgctcgaggctctgccgcagctcatcgaggcggtcctgcctgagacgcacaagcccttcctgccgcacctcgtcccgctcctgaccgaggcgagcccgttcggcaacgcgacacgccttgatttcgggacgggccacgaggccgccttctttctcttcctgtttgcgcttcgtcgcatcggcgtcttgaccgaggcggacgacctcgacgtcggcctcgtcgtctttccggcgtgcgtcttcgggtgagaccagggtgttcgcaaagggctttggctgacacagtctctaccgcagttacctggacctcatatgggccctccaggacacctacaggcttgagccggcaggcagccatggcgtttggggccttgacgactacggcttcttgccgtacgtctcccactcctcgccgtaagaggcaacacgtcctgatttctcccccgctttcgcacggaacagttacttcttcggctcggcgcaactgcttcgctcgtctctacagccgagtgggctactgcctgcgagcaaacggccaacctcgcagcggctccgcgacccgactgtcgagacctctgctcctagggcaagcgcccaacaagctcaggcgctggagctctggacgttgtctctgcaccgggtcgacaagctcaagacggggccctggagcgagcactcggtgcgcttcctcctgtcgagagctgtacacctctgcattaccgacggctgacctcctgcctgtgacaccccgcagccgctcctctatggcctctcgactcaggtctccaaaggctggcccaagattcacgacggcctgcgcaagatgtacgaggccgaggtgctcggcaagcttgtcgtcgtccgaggcctgcgtgtcggcggcatcatcgcctgggactgagtcgacgttaggggcgcggcggcgtgtccgccctcgtccgctgcccggcttcgcccagcccaccgcagcccgttggccagagcagttttcggtcaggcgaagcatcgtcgagacgcgtttgacaagctcagcctgcgcccacctgaataaccggcctggcggcgagggagcgaggtcggccggccgagcgcgatttagcttccgacggcccgcttaaggtcgtccgtgcaagggcccgcggcctcgacgtcggtcgactcttaagaagctcgcccttctctgtcctccatcattcaccatcttgcctgcctccttctgtacgtagagcgagcatcacgccgcccgagttgagatcgaaagggctcatcccgtcctgcgcgcgccagcccgatcctctccgagatcgcccgcctcagtccttctctgcccgacgttctctccgcggcgtcaaccgatgtcgacccccgcaagcgggttgagtcgctcctcggcctctcgtccaagattgccctcctcgaggcgaggctcgacgcctgctacccgacgtcgggcgcggacgagaacgagagcaagacggcgccctatcatcactctgcgttccggatgtacggcctgatggcccggctctacctcaagcaggtcgtcttgcacaggtccgtacgctcgcgcacatcggtcaaaaccatcagagtgactaaacccctctgttgctccttgttgcagcaacgcccggtcgatcgccaaccagacactcgtcgcccagctgctcgaggccatcaagatcgtccagccgacgccgttcgagagttcgctcctattcccaatctttatcgccggcgtcgactgcgtcaccccccgcgaccgcgagacgattcgggcgctctttgagggcctacattcgaagtaagtcgacttctcgcgaccctctctgcacagccagccaaggtcctgatcctcgcgcgcgcccaccagctgccggatcggcaacatccagacggccttccagctgctcaatgagatctggcagcgcaacgagagcggcgaccgctgggtcaactgggcccagctcactcgcgagctcggctggcacgtctcgtttgcttgagaatagtcgggcgcttcgcaaattgatgcacctgttgaaggtctgatgcaagcttcgggaggtttcggcggaggccggtcgagatcgcttcggtgcttagcgccggaggcgaccctgggcagcagcttcctgtcctgctcctgcaccaacgacgccatcctccagcactcccttctttgtacgcctgaactcatgtcgatcctccctcgctcgctcgcccgctcagcagtggcacttccgtcccggacctgccacgtccgccggtcgtacgcctacgcctcgactgccgagctcgtcgagaagggcaagcggctgattccgaacggcgtcggccggaagtacgtgtcgagctactctagggccgtcagggccgtctgagctaccgtcgctgacatgcgctctctttgccaggtgggacatcatcatcgaggacggcaaggggctcgacgtcacgctcggtgtgagctaaagcctcagccatcgcagagcgccgatagaccgcagcactgatcgccgactcgccccgcaggatggcagcaagaagctcgactttacggccggcattggtgtcgtcagtcgatgctcagctcgaggacagtagagcaaggctagcatggctgacctgcgcgtgccggcttgtccttggcagaccaacctcggccactgccacccaaccgtcaccgaggccgtcagcaagcagattggcaaggtcacacacgtccagtgcgcaattggcatgtcgggcccgcacgtcgagctcggtgaggaccgacagcctgcctgacctctcgcgtgcttcccgagctgacttacatgcgctgccgacaagttgaccggctgagccagcgcctgccgtggaaggacgactcgcacattttcctctggaactcgggcagcgaggcggtcgaagcggcgatcaaggtcgcgcgcaacagcacaggtaagcagaacatcatcaagatgagcggcgcggtgagttaaccatcttgcccatcagctcgcgggcacggagagctgacgcaacctgctccctcagtaccacggccggacctacggcgcgagcgctatcacggcatctaaggcgtgtcctgttgaaaagcaggccacttcacgatcgagctgactttcgcctgcaccgcgacccctcgcagacaatctactcgcagggcgttggcccggtcatgcctggcgtcttcatgacgcccttccccttttggcactcgatgggcctctcgcgcgacacgtctgaggaagagctcgtcaaggcagccgtctaccagctcgagctcgtcctccagcagcagactgccccgtctgacacggccgccatctttgtcgagcccctgctcggcgagggaggctacgtcccgacgccgcacgcctacctccaggcgctccgggccatctgcgacaagcaccagattatgctcgtcatcgacgaggtccagtctggctacggccggaccggtgcgttctggtgttccgagcacagcggcgtcgacggagacatctacatcttcgcaaagggccttgcaaacggctacccgctgagcggcatcgcctcgagcaaggaggtgatgagctcgatgccgcctggatcgctcggtggcacgtacgccggcaacgtcgtctcgtgcgcggccgccaacgccgtcctcgatgtcgtacgtccgctcgctgctgcgcctcaccaggctacgctaatgccgagtctccccgtctgcagtttgagtcagaggacattctcggcaacgtcaaggcccggtcaaatcagatgttctcgcacctggacgagctcacatcctcgtcaaagacgtcgcacatggttgccgaggtccgcggccagggtttggttagtctcgctccagctggtcgacagcaaccgtgccatctgaacgattcctctcatccactgatacacagatgctcgccgtcgagttcaacgacccaaacgacccgatttgcaagatgcacgcgaccgagggcaagactgtgccgaaggacatccacaaccgcgtccagaagaagtgctttgagcaaggcctaatggtcctgacgacctcgatctacccagtgcgtcctcgtccacaagcggcgatccgaatagcacgctgacactgtcgatctcgctgcaggtcgtccgtttcatcccggctctgattgtcagcgaggcgcaggtcgacaaggccatgggcatcttcaagaaggcggtcgaggaggttgcgctcgagggctgagcgcccgagggaggtttctgcgggactaggagaagacgaccgcaccgttgtatgccattgccgagcagctccttgtatgccatgcctcccgggctcattgcgcagatttagcttgagtgccggcactttgcgaagaactcatggtaccagcacacggcgccccgcgtcgaagagagcggcacggagagtcgccgatgcccctcctcgatgccacgaacgccgactctcgctcctgatactctcacctacagctacctcgtatactcttgctcgccatgtcggtcgctgccaaacgcacgctcttcggctctgtcgtcttctgcgcccttaccattgtcggcgttcactacggccagatccaggagtcggaggtgcggccgcgacagcgacttggctcagcccagcccggcttgcctccggaagtcgactcgagccctagactgacccttagcggctcgcccatgttcctggcagaacatgtaccagggcgtcgttaaggacgaggcacgccgacaggctaggctcgccgagctgtcggcctcgccgagctcagcgccgcgagcctcggcttggtcgacgagcagtacgcccgccggcggcgctgctcctctgtccgcctcggccccggccggcctctcgccaacacaaaaggccgcggtcgacggctgggtgccgccggccgacgtcaagacgggcgtcgatggcgagaaggagcggctcaagctcgagcgcctcctggactttgagcgcagccaggtccgcgaggccaagctgaaggccgagcagtctcttgtctgaggcgtcaaagcccgtgcgaagccaaaacccccctctatcttgtcatgctcgccgtcctcaactcggcgttcggcgtctacacgacggtcgatcggccttcgcgcccggttccgcaggctttctcggccgatcgccggtgcggcgggcaggttgcttcgacagccacgccgcgaccgtcgtgcaggacgagactctgtatgtcctgctggaaggagggttgctgtcagagcgtgcttgcatgctgcttatctcgagctacgagcaatggatcctatgcggcgatgctcattcacgtccgcagcgcgcccgccacaacccaattctagctctagcgtgggggaagcctaccgaagagggctaggttgggcagaaacgacatgctgtgtcaccgccgaggccgtcgcttgacgtagtgtagaagaggcgaaacagcgaagcgactgggaaggacaaaggagcgacggtcgacgagcgtagaggaagtgtccgtcgattaacgacgtcggcaggtgagtttctgcgaggtttgggcagggagaagatcatcggaacgggagcttgaaaggtgacgacgggcggaaagtaaggaagggtagcagcgagggggcgagagtagtgataaggtcgccccgccggcagcgacgtgcactcgagcggctctggtcgactgcaacaaaggctttcgaacttgcaaagcgaaatgaccaggcgtgtcagcttcagggcagcaccagtcagacttaagacgtcgaggaaggacgcacgatgaggccgtcggggctctggcctgacgttggcggcggccaaggatggcgacggtcgctacgcgcccgaccgcgggatgacccggccgtgccgatcttccagcacggtgccggcattgcaccaaatctcctctgcgaggtccttccaactattgtcgtccggtaagacgtcattgacaccagccaaggcaacgcgcctcggccggatgacatcgacggcgaagatgatccgattgccgtcgactgagaactcttcttcttcgccctcgtcaagatacgaatggaagagaatcaggagatcgagcttgaggcgggcccacgacgtagaaaatgcggcggaggccccgttccagaaaaagggagaattgacgccctccaagccaacggggcggtcgaggtcgagcataaaggttttgagcgaggggcaaagagcggggatgtccagcggcgcaaaatcgtcctcactataggctagacagaggtgaaggaccctgagctggtggccgagagatttgagggagtgctccaacagctcgtgggacttcgctttccacaccagatttgcagggccgacgatacggaggtcggacagagagggcagctttgacgggtcgaggatcatgccgaggaccttctcgttgtgttcgtctctagtgttgcctgctgcgacctcgaggtggacgacgtgcgagaggtcaaaccagtcactgatatggctctgctctgggaaagcctcgcccagggtctggacgcggagatgtgtcaaagccgaggtgatgcgaggcggcgagcggacgttcggccagatgaagacgccagagagcgattcaaggccggggaaggaggatacctgcgacaggatcgacgggcacttgccttcgtccgtgtcgagctcccaaccagcccgttcctcgaagtgaaggcgccgaacccagctgcgcacgtcgggcaacgagcggagagttcgaaggaagagctcttcgtcaaatcggcgcagtatgtgaggcaccaccgggatgtcgctctgtcctgagacaagggttacgatccgggaaggcatacggataggcccagcgaagacgaccgccgcgtaaaggagagggttggccaacgcctgtcgggcgtagcagcaggcgaggtcagcctcatctagtgcccgcaacgagctcgggcttctcctatgacgaggcacgacgcacatgccaaagcttacagacaaccgttagagcgagaagcacgtcccggttgcggaggatgatctcgcgctcgtcctcgtcaaagtgagcgacgacgggctcgagcgtcgcttcgatgaccgcgagctgaagctcgggcggcagctgcgggagagtgctgtcggcgccatgtgcatcagtagcggcagccatagcggatgacctgacactgactactcacggcattctgaggaggcgagacgagagtgagccgggcgaagagaggtcggagatgagagatctggtcgggaggaccgggcggcgaacggcgcgcagtctctcgcagcttgggagacttgagccggctgcaaagctgatggacggctggtcgtcgaatgaagaccggactgagcgagctggctcgttgtcgaaggtgttgttccggggcagaagatggtggtggtcgagagtcgagaaggaggttgaggtcgttccaccatctcgccccggctcacgcatcttccggccgagcatgcgtacgtcgaccacggcaccttctcgcgcctttaatacagcagcagcagacagatggcagcccatcttcatcttcgtgtgcctgagagaaagggatgcctatccgtttcgaaagggacgtatcaacatgcgaggcagtaaggaagcaccgccgatggcggagtgagaggagggggttgcgagtgaagagaccatagagaccaggacggaaagagggcgagatgatggtcaaggagagcaaagagaggggagtagcagcgagagaagtacgaaagacctggcgtcgaggtcgtcaaaagatttggccgagcgcatctagattgatcggaccgacgaggtggcccgcccgcccgctctagccgagtgtttgacatgccccccgatcggccgagggttgcttctagattgcgggtacgaagccgtctcggagatgactagacgacgccatctgtcgcgcctctcagccgagactagaggaaaggacggtaggccttctattccggcgcctcacggcgccgtcgccggcgggtcggccagcggcgggagcgagccacctcgtgccttgcgcttctcgagctgggcgttgacccaggcgggcatgtcgacctcgacgccctcgttggccttgagccaggggtgcttgagcaggtcgccgtacgttggccgggcggtcggctccttgcgcagactgcgggcgtggcgtgcaggagggcgggtcagcagcacatactctttgagtctgctcgcgcatgaagcagcgacgtaccagctggcaacaaagtcgcgggcctcggcgctgaacgactctggcagcgtcggcggctggccgtgaacgatcgcctggagctgggcgagcgggctcgaaaacgtctcgggcgggtaggggtacttgccgatcgcaatctcgatgatcgacaggccgagcgaccagacgtcggacgagactgagtaggtgccgagctggttggcgtactcgcctgtgatgcgctcgggctgtgcgagcgggaaggcgaatgagagcgactcgagtcagcactgacattcgggctgcagacagagccaaggagggaagggggaagaacggaccgccatatacgtctcgcagccgatgtttgtctttgcgagcgacttctcgagctggcccgagacgccaaagtcacacagcttgacctcgcccttgcggttaacgagaatgttggtcggcttgacgtctggatgaagcgagaagcctcgggcgtcagcatgcgcgagagttctgattgacccgcaaagaggacgaaccgcggtgcatgatctggagcgtgtccttgaggaaaccgaggccggtgacgatgtcctttgtgattgtggcaaggaccttctcatcctggacgccgccggcgtagaccttgtcaagcgagccggcgtccataaactccatgcagtagtagacgcacgactcgataaagaaggcgccgtaaaactcgacgatctgcggggcgattgcccggtgaaggatgtcgagctccatcaggatgccgttgagcttcgactcgtcgagctcgaggtgaatctcctgcaaagaaaattagaatagcgaccgtcagcagcctgcggtcttgtgcctcggacaaagcaggacgacgtaccttcatggccatgacgacctttgtcggcttgtggtagaccttttggacggtgccgtactggccctttccaagctcctccatgagcgtgagctcggtcatgttgattttgtacgactggccagacgaaaagtcgacgccctcggcgtggaggacggccttagacgagaagttgagccggcccgaggcgtcgctacgagtgcaaggctggtgagtcagcggggacgagcgctccaagaccgacgacgtaggaaggcggacgtacacaatctttccaaagttggagaaggcgtccttgcgcgggccgaggccgcccatcccactcaggctcatccctcctggtccacccgggccggagagactcatcccgccgggtccacccgccggccggccaggcggagcaaaacgccttccaccgagcccccctggtggaccacccggcagcggccggcctccaggcgcaccggcgacacctccgttggcggcggcggcagcggctgctcggcgcgcggcaaggccgcccatcgtcgctggcggggcggacgacgtcgggagcccacgaggccggttcatcagcgacggcgggacggggctcaccgtcgagcccggtgcgccgccagcggcgcggagtcctccggctgggttggccgagcgctgagcggcgagcttggccgcaagaccaggcggcatcggggtcgctcctccaggtcgaggaccggccccgccagcgatgggcgaccctccacctccgttgggagcgccgccgccgagggtaggtcccctcggcgcgggacctccgttaagcgcgagacccatgccggcccgccgagcgcccatgccagccggtggaagtcgcggcgccgagctgctcgagctgccagcgagagcgcccgagggcgcaggggccgaagcccggtgaccgccaagcggaggcgggttcgggctgctgctgcctgacggagagaccgcagatggagaagtggcgccgggcgacggcatcggcggtcgcggcgagagcgaagccgaaggaggaggcgaggcagaggtgggtgcggcggctgttcgggcgcgtcggtcggcaggagacgggcgacaggaggaggtgccgagcagatgaagacagggtcgagaatgatgcagaaaaagagctggtgtcagtcgtgattcctcgtcatctagcaggcactcgagtccaagcggagaaggttggtaaggcgagttgaggaagggacgacaggaacgatgcgtcatggcgctccgctcctgtcgcctctcgttctcagagctcgacctctcaccagagctgccctatcgagcacctctcagctgctccaggcatgagcaggatgcagctctcttcctctccctgcctcgtgaggtgttcagagatgtgcaaggtaggcttgcgtggtggtccggcgagcaggggaaagaaggccaaggccggctgacaggaggacggacctgcgctgggcgagccggcggcggcggcgacaggtgaggcgggagtcttgtcgagcgaaaggccggccactcggtcagagaggtcggcggcggccatcgtagtctttgaggcaagttatggtggttgacagcagaaggaggaagaggaggaggcggaggtcgaagccgccgccgccgcagaggacgatcgcccgccgagcctccgggcagggcgcagccaccagcgaccactagtcgatcctcctgccttcttaaacacggagaaaacggcgagcacttcattcgtacaagtcgaacccgacgttcacgccacccgccgacgtttgcgctcaaacggcagctcgtcgtccttgaagctccggacgggcgcgtcccactgcgggcgagagcggggccgtcagtcagaataggagagtgagagtgacgtaaaggggagccgaccgtggcacggagctcgacgtcaacctccttgacctcgacgacgagttcctcctcctcctcttcccactcgccgtcgccgagatcgccggcgccgtagccgttgccgacgacgaggaacccgtcgtcgtcgtcgtcatcctcgggcggcgggccgtcgagcaggagcgcctcaaattcgtcgtctgaatcgcgcccgccctttttcttgtggcccttgcccttgcccttgcccttgcccttcgggcccttggggtgggtcccgccgaccggcttgaccggcggcaggcggtgccggatgatgcctccgcccgtcgtcgtcacgatgacgcccttgctgtcgtacacggggccgtagtagagctccttgcccttctcgatgagcggaccgggttcggccatgcgcgaggcccggaggaggagacccggcggcgcgatgtagtggaggacgttggcgagcatgttgggatgccggtgcgcgccaccgggggcgagcgccgttgtcggcaggccagcgacaaccgcgcgcgaacgagcacgggcaacctcgggcggaagaacgacgccggacgaaattggcggaacttgcgggacaagaccggtcgtccgtgccgaggggacggcgatcgaggcaaagagtgagggcgagggcgagtaggcctcaggtggggccgactggaacgacaggtggtaggcagcccggagacgcttggcattcttccctccaacgggaggctggccaccggcgagggccgactggggatctacgatgatcgctcggttgagcgccgaataggccgagatgagcgcaggaagcgtcgcactgtgggccatcgtcggcgcagagtggactgtctggccgtcggggcccgaagggaaggaaagccctgccccgccgctactgctgctgctgctctcggccaatgatgaccgggcgtaaggcgtcgaccggagaaaagacggctggtcgccgacgaaggaaggctcgacagacgcccggcctggcaggagcgcaggcgtctcggcccgtgagggcgtcactggcccgttgagcgcggcgcccaagaggggcgtgcccagccgcgggagacgagctgctgcgatggacatcgctgtcggcggcgcaggaagcgcgggcagatgcgccatccgacgaccgaagggcagcggccgccgctcgagcccgctagtagcctcttcgcgcccttcttcctcctcagccgcgacctccgcttcaagcgcggcaaggctgagcggcgatggcgaccgctgctcccgttgcgaaggtattggtggccgatcctcatttgctgagccgtcaccgccgtctggctcgatgccctcatcctctgagccggcaggctcaagcttgacgacggccggccggacaccgacctcgtcctcagcctcgtcggagtctgagtccgagtccgagtatgctgggtcgtttgctcgctcatacgcgaggtgggcttcgatctgctcggctgaaggcgagccgtagacgtagacttgtcgatcggatgagtccggcgtctcgaggccgtcttcgaggtagcctggcagagtgatggcgaacagcagcagcagcgacagaggtcagccgaccgtggcagtatcagccgagcgactttcaacgccaggacgtacttcgcaggccttcgagcccgccccgggctttggatggaccttcttggatcagaggcggcccgagctcgtcctcgtcgagcgcgtctactcggccggcctcgaggagctcgtcgacgctcaggccgagctcgtccagcgcccgaacgccatccatcaggccggcgtgggtccggcccgaggcgtcggcgtagctgccggccgtcgacgccaggagcgagagaaagtgggcgaggacgtcggtcagggcgtgcgaggccgagagcgaggacgagctgaagccttcctggctgtcggcggcgaatgtcgaggaggaagaccgtcagcctagggcagtcctcgaactatgaacttttctgggaacgtacgcgagcgactgaagtgcaacgaggtgcaagagatggagcggcaaggccgacggaggaggggccatgctgtatcgggtggtcgacgtcgagcagcaaggagtagacgcgacgaggttcgccgcagtcggccctgtcgaggcagctcgccctgtaccttggaccgccatctcctcatgccacaagtcctgacagccgacaagctggcagagcgaaggtcgccctcgtcgccggtccgaacatcgccgctcgctcgagcgagcagcctcctgcaacaggtccatctcccgccggcgccatccttccacttcggtggaggcagcagcagctcaccgacagccgccaacgccgccgccgatggcagctcgccaacgaagaccggctttcactttggactgccgactctacgcgtgcccgatgccatccgtctgcccgatgcgattcggctgcccgactttgacctgcccaagctcgagctcgggccggcctgggcgcagttccgcgcgcggtccgccctcttcctcgacgagtcctcctagacgcccggctgattactcaaaacgacagcttccagcagcagaatcatgagaaggagcttccgccgctgcccgcgctctgtctagagggctacgagccaaagggccaatggaagtggatgggcgactggcgggtctactgcgtacgccctcctgcttccggtgccgtcaacacatactgactgaatactcaattttatttggtcaggtcggggctgacccctctctcggtgcgtcgagtcaccctgttggtgttctttccacactctttaaccccactgtcccgttcagactgcctcatcggcgcgagcgacatctttggcccgcagacgctccagacgatccagggtgctgacatcatccaccacctgacgggcgcaaccgtctacgtcccggactttttccactcggcgcccttcccgacgagtatgttcccgccgcgcacggccgagcaggtccgcgcgctccaggtctttttcgagggccgcgcaaacatcgacgacaaccgggacgcgctcgttgcgttcggcgcggcgctcagggagcgcttccgccgacaagcaaattacgacgaaaatgatcaggagggtgttagggacaacgaaggtgacgagtctgccgtgcgtgaggacgagtgggagaagtgggtccgcgtcggctgctacggcatctcgtggggtgcgtgccgagccgacttgactggtcctggtcaagcattccgctgacgtcctgcttctttctctgtcaggcggaaaactctctttcctcgccggcagtggggcgagccccttctatgccgttgctagcgtcacaccggcgtgcgtctcaatgcagatgcgactccctcgcgcgtcattgaacaatctttcctttgtctctgacgcaggatgatgacgatccttgatgccgaggcgctcaaggtcccgctcggcctctttctcagtaaggacgagcctgcggacgtcggcgagcgcatcatcgatctgctgcggttcaaaacctttagcagcaaatgccaggtccggacgtggggcgacatgtgcgtttttcttgactctagcgctcttattcctgcacaagttgacctttgtgctacctatttgaccaggccgcatggctttcctggcgctcgtggcgacctccgcttgaagccggtcacggccgcctacctcgagctctacaccgcgctcgcccgcttcttcttgagctgccagcgcgcagaccacaccggccagtccatcgtctctgcaccggaaaatgatccgcaaacggtcgatgttgtcgaggaggacgtcgggcgtgagggactaacaaatggagaatcgatcgaagggaaggtgcgtgacgagaagcaacgccagcggcgatggttcggccgtcggaagccggcaacgagcgaccggagcacccagccttgaacgatggtcaggctcgacgtgtcgcttctcgactgccagcatcgtgggtcgccctccagttcgaccgcctcgtcgtacacgagtcccgaggcagccaggcccaaacaagtcgatgctcaagccgcgcgattgctgccggatccgtcaggcagtacccgcaacccgcctcaaacagatcgcctggccggagcactggatcatttatcctcatgctggcggccggcatccctccagcaccgccctcgatgggcgttacaggcgagaagcaccccggcaagacggcgtcgcctggactgtcgatcctgccccaaccttggacctcaagctatctccaatagtaggtctagaagtctgacatcaaacaattccggcccgcattgcggccaacgggctgacagataccgtcctcctttcgactgtagattgatgtccgcctgtcttaacctagcctgcaaatgcgctagagacgctgtcttgaccgcggtcggaacgccctttcctgacaggcaagcctgagcgagtgcaagtctgacgacgacatcctgatcatcctgattggcaggccgaggccagtctacatgagcccgtggaacgggtagattttgggctcctcggtgcccggcacccgcttgccgcctgctggactctcgatgccgaggaagaggtactcgcttcccatcccgttgcggtcgacgagccgctcgcaggcgccctcgagctcttcgcgccgtttcgaatcggcctgaagcgaaggtagcttgagcagctcggcaaggcggatcgagagacccattgcctcgagccagtcggcctgcgtcattggtccggccgcctgcggaggctcgggtaatgtcgagagggcatgccggaggtaggcaaagtcaacattggtcgtcaggtcagccgtgccgacgtggtcaaacggcgagacggccgcgtggtccttgaaggcccggaatgattcgctcgcccagccgtccttgccatagtcgacgacgaggccggctccgccgcccgagccggggccgacaagcgcgccgagccgatgcatgatgctgaaggcctggggcgagatctcgactcgctcgccctccttgacggttgagaagtgcggggaagtcgtcgggaggtaggacgagtggttggtcggcttgggcgagagtgtcaggtggagagtcgacgacggcggcgtgtgcgtcaggaggagctcgcggaagcgcggggcggccggcttgtcgtcgaccggcggcgcatcggctggggtctcggcggcggcggacgattccaactcttctaccgccggtgtcggcgggatgcgctcgaggatgtgaatcggaagggcgtcaaagaactcgtgggcgatgaagaaggtgaaggcgtcggctggaagggcgaagcagccggcgagacgaagtcagcatgacgactcgacaaatgggccgagagcgcgacgcacactgcggaatctgctcaacaacgtcccaatgcctgacgggcgggctcaagctacccggtcggccggcgccggccttcgaaagggctgcgctctgaaccgcacgaaggacgtccgacgtctcaacaaggtcgatgctctcgataccgtccgcgacctcggggaacgagttgagcgtctgcgcgccggaatagagtcgcgaaagcggtcagcagtctgcaactcgacgtcacctagttgagaggcgaggcggcaagcacgggacgcacacgcagaacgtcggccatgagcgtacccctgccagggccgagttcgaccaggcggaccttggccggcgagccatttgcttgccagcgcgtgatgaaccagattgccatcagctgtgggtcagcggcagggaaatggggtacgtcagtccaggtcgacagcagaggccctccttcggttgagacgcgcgcgctcattcacgcctgagttgggcagcgcagcgaccgccgagcagcagactgacctcgccaaacgtctgcgaaatctcgggcgaggtgataaagtcgccctccttgccgaagacgtcggcgccgcgggctgtgtagtagccctgggtcggatgcgagaggcagagcgtcatgtagcgtgcgagcggcatcgggccggtcgcctgtgtgcgtgcgagagagcggagccggggagcggtcagcttgggcagaagccacacgtcaggaggacctctcccagccggcacgcacgtcaatcgtcttgcggacgatctcgccgaggggcatctcgccgacaggtgtcgacgctccggacgaccgcttcgtcgtgtcaatgtcgagcggcgacgacgacgacgcgccgctggcgaggcagcttgtgcacgtcaaccgccggcgaccgaggttgaggatcgtcgcccgtctgctagaaagggcggtggaaggacggcctgctgctagccttgcgagggctgtccgggtcgacatgttcgtgaagagagaagggggtcggtgtcgggagcaaggtcggagggtcggtctgctggctcgctcgactggcttgctctgccagccatctcgtaacggccaccttccagccagaacgacccaacagaacccacttctcagatcagcacatggtccgttcctgatcatgaccgtgctcctgctcctcttgcagctgaccagcttcaccttgttcgcagtccaccgcctgccgccgccggctgatccgcgacttcaagcggctgtcgtcggacccgccgtttggcgtctcgggcgcgccctgcgccgacaacctcatgctctggaacgcagtcatctttgggcctggtgcgtctagcccttctgctccggcatgcttttcgggtcgcaacggacgaaggcgagggacgaagcgcacgggggtgggaaggcccagccacgagctggctgcgggagcaagccctgctgccacgctgacggaccagtgcctagcggcccctttggccactcgtcgcccgacgagcaagacacggtctcgcactgcgtggaaggggacgttactcggagtacccctagcaaacctcgtcgagggtccgccggactgcctgtcgaagcagggcagcccgccttgacggtaggcccgagtcgctctcgctcggcggcgcgcaggcgtgggccacctcgcctatgtccgtcggccgaatccgctcggcctcaaatctgaggagagggatagcctgacagagaggacggcctgtggcgtcaggcgggcgctggccagtcgggctcagtagggtgctggaacagtcgccctctcataccaaagggaggtggtcgcttagtggcctccttcaccattgctgtcgacgctgtgacccgcaaaagggttacttgtgctcagccgccgggtttcactatcgagcgctggacggactcatgagctgaccttgacatattttcgccctcgttcttccagcggagacgccgttcgaggacggcacgttccggctgacgctctcgttcgaggagacgtacccgaacaagccgccgacggtccggttccagtcgcgcatgttccacccgaacgtctatgcgaacggcgagctttgcctcgacatcctccagaatcgctggagcccgacgtacgacgtggcggcgatcctgacgagcatccagagcctgttcaacgaccccaaccccaactcgtgcgtgcctcactttgagctatgctcggctgtcggcgctctcggtcgaatactgacgctgtgcaccctaccattcgctcgcccagacccgccaacgccgaggctgctcagctctaccgcgacagcatgaaggagtacgtccggcgcgtcaagcagacggtcgaggcctcgtgggtcgagggcgatgaggaggaggaggaggccgaagaaggcgacgaggacgacagggccgagggcgagcggccgatggaggtcgagtcgacgttgactgctgcctgaggcggccctccttccaggcggcctggcttgcctcgtcgtccacctctcgccttccggacctgtcgctctcccgcgctcctcattcgaggcatcgccgtcagcgccgtgtcctcggtcgggcaagagaggattggtcggccactagtgatggagacggccagacggggccgcggctcggccttctcgcaacgctgcgaggctcggccaacggcgttcggtctcccgtaagtcagctcgcacaaacgcgcgagcccgagccagatcgagataagcctcgactcgatctggctgatcgtcagattgattgagaaaaggacatgcgatgtagaagaacagttggagggcggcgcgggatgagggacgtgtgtgtgagagaggtggggcagaatacagggttgacggcttgaacgcaggccgcaaggtctgtgtgggtcggtctggagaggaaagaagttatgctgggagggtggagtgtgggtgagttagagtaagctgaaagagaggcaggaccgcatgaggttcacgtcgggcggtgcaaggccgcgtgcgggatgaagctgactgtgaggcaccggttggcgccgggatccgagattgatgcgttggaggccgaagagagaagcagacggatggcggagaagaacagaggcgccggccctacgtggcaaggtcctcgaaggcgcaggtgctgagagggtgcgagaaggcggtgggagtcagcatggcgcagttgagcctgcagagacagagacgagcgacgcactcgaccgccttctggtagatcgacttgtagctccagacgctgcccttgatgcgcttgaagtcgaccgagtagaggccgggcaggtttttgagccgggtgacctcgaccgagaagcgcacctcgtcgccagcgtcctgctgagaggctgcgtggacgccggtcgccgatgtcgacgtcgcctcctcggacgtgtgaccgatcgatgaggccgagtcgttgagcgacggcgactgggctgcagcgacaactgggctcaagtggaccgacgagctgtacgacgacgagcgacgcatcatcaggcccttgagacccgaagacgagagaaacgaggccgagggtgaggtcggcatcggcaggccgcgcttgtcagtctgtagggtggggtttgcaaagtgtcagccaagtcgccgaaaagggggacggtcgtgagagctgccgcacctgtgatgcgctcgccatgcccatgaatgagaagctgccgctcgagcctgaaggggcgacggccgagccggcaataccgagaccgacgttgccccgggcccgcttcgagcgcgtgcacttgagacggaactcgccgtcgcgcttgacctcgacgtcgagctcctggagcgcgcggatgatctggtcaaggacggccggcggtagtcggctcgtgaccgtcttctgatcaatcacgccggcgtggtagcgcacgctcgccgggctgaaggcgcggaccggccgcatcgaggcaaggggcggcattgtcagcgcgtcggcctgctgccgggccgaggcggtcgtccgctgcgagctgagcgagtcgccagcggcgcggtacgaagagggcgcggccgagtgtgagctgagcgtcgccgatggcggcggggccgcaccaaagtcggtcgcgccggtgacgacgagggccggcgcaaacgacgactcgtttgagacggcgggcggcgagggcgtggccggaaccacggcgtggctcaggtcggtggaaaggcggctcggcggcggcggtgtccaagtcgtcggcgagggaatgttaacgaaggactcggttttgcccggtgagcgccggtcgacggcgcctgcgctcgtctttaggctctttttgcggaaccagtccatgaccttctgagccgggccagtcgagacggtggacgaggcaggcgtaggaggccgctgctgctgggcccggaactggccatcgacgggcgtgcgcgggctctgaacgatcgggccggtgctcatccgcgaggacggccgactcgacgacttagagaagcgcgaagtggtgggctcggtgaagacgctgctggtcggcgtcgccttcttgctactccgccggtcgaggctgcggagggcacaaaggaaggtcagcgtcgatctcgaggcatgagcagcgaacgacgcgaagggccgactcacgtagtcttgaaggcgagcgtcagggtgttgcgccggcccttcttgtcagccttggccttggcggcgtcgaccggggcgttctcgccggatcggcgggtggcctggtcggacgacgagttgacgttctggttgctccgagtcgagtcgaggagggcagacatccgcgagagcgtcgaccgcgagcgggtcggctcgagcggcgcggcagtgacggcctcggggtccggcagaggcttctccacgaccggcgcggatgcggcttcgctcggcgcctgaaccggtgacggggtcacctcgacggacgcagcggccggcacagcgccggcgttgatgatgtcggccagagccggcccgcgaggcgtgtcgggaggagacaaagcctggccgagcgaggccttgggcgtcgtgagcaggtcggccggagcagggcctttcgtgtttggcggcgtcatcggccggggcataagttgcgagggcgccggggtcgggagggccgtgtcggtgaccgaagaggcgcccgagctgagcagccggggcggcgacgacgacgacgccatctccacatcatgctgcgcctcgaccggcgagacatcagggatagcgatgggaggcgagacgagagccggcggaggtgctgcaacaggcgaggcgacgttgtgatacgtcgtcacggctggggccgggacggccgcgccggagaagggcaacgaggctgagagctgcgacgtcgttcgcgagcggctcgagctcggccgcgcacggactgagtcggcgaggtccatcggctgagaggtcgaaagcggaggctccaggtccgggcttggctcggacgcgtactcgacttggatcgtgtggtgcttgcggcgcgatacactcgttggcgccgtcgtgacgtcgacgcttggccggtcgagctccgagtcgcttgcgagcgcgccaacccgcgaccgaggctcaccccgagcgtcaccttcagctaggaagacgtcgcgttcgcggccggccaaatcgctcggcgtctcggcgtcggtccgagagcgcgacgacggtgcgcgctccatcggcgtcgagggcgaggtcgaggccgtctcgcggatgccttcggcgaaaaagtcgggcatcgtcgtcgacgtcgtcgggagcgcgctctggtgccgctgagccttgacgcgcgtcgcgacgccggcaacggtggtcaggagaccggtccgggccgactggctccgagccatctcttgcgcggcctgacgctgggcggcctgctccttgagggccttgcgttcctccatctccttccgggcctgctggcgcttgacccggtgctggcggttggcgacctcctcgagctcctcgaccgaccggtcgagcaggtcggcgtgcttctcgagccacgggtgagccatgatgtcgcggagcgtcgcccgccgggtcgggtccgggacgagcatgatcgagagcaggtcgcgcgcgaccggcgagatctgcggcgggaactggagctgtgtgttgaggatgtagcggtagaggaggttgatgttgtcgccctcggggttagccgggtcgtcatcaaagggcaggtagcccgagagcatggcgtagaggatgacgccgcagctccagatgtcgacggccgagccggcgtagaggccctcggcgacgacgagctcgggcgcagcgtagcacggactgccgcatgacgttgccatcaggtcgtcgcgcgaggcgtcaaactgattggcgaagccaaagtcggtaatgataacgttgcgcgccttgtcgagcaggaggttttcgagcttgaggtcgcggtggatgatgtttttcgagtgaaggtagtggacgcccgagataagctgagcaaacagcttggacgcgtccttctccttcaggtagcggtgggcgaggatgtggtcaaagagttcgccgcctggcgtcgagagcgaaaaagaggttagctcgggtcgccgcggtcacttcaagactcaaggcgggcaggacgcaccatcggcgaagccgaggatgataccgatgtacttttccgtctcgacgaggtcgtagagccggacgacgttctggtgcttgacgtgctgcaagagaggcaaaggagggtcaggctttgacgccggctgccgttgacagacgcaggaggggcggcacgcacgctcagcacctcgatctcgcgccggaccttcagcatgcgcgtgtcgccgtcgccgccgagattgttcttcttgatgagcttgacggcacactcttcgccaaagtccttgtggattgcgagcttgaccttgccaaattcgccttcgccgagcgtctgaagcaggatgtacgacccaaactcgagttgggcccggcgcgggtgctccttcttgaacacgacgacggccgggtggtcctcaccgatggtccgttcgcgaggagcggcgcgttcggtcgccgacggcggctggtgcgacgcccgcttacgcgagccggcgacggcagctgccgcctgctgctgctgctgcagctgcttggcttgccactcgtgctcgcgcgaagcctgctcatactggtacagctgttgctcgggcgtgagcgtcgcggcgtacggcgccgagaggcctgtcgtcggctggtacgagaccggtcgagcgcgggcggccgacgcctgggcctcgtgctgctgctgatcggcccgtgcccgcgcgagctgccggtcacgctcgagcgcgtcgacatcggcgtaaaagctggccccagtgtcgatcgagtctatcgggtaggactcggaagggtccggcagcggctgagggggcgacattggcggcgagggatagcggtcggaggcttgggccgaggccgaggggtaggagccgcggtggtccttggcaagcgcgtcgtcaaaatggaacgacgacgagacggacgtcatgctggcagactatgagcggagagacgggctagggcagacttaatggcggacggagcattgagtggcaagacgggacgcgaggtgggaggaagtgaggccagaaggaagaggggtgtcaggtgttgtccttggctcgagacgacgacgcccgaccgtgtcaggcgaactgcgacgacctcctggcgaggtcgttggtcatcatcgagctgtcgagatgaccagccctcatccagtggccgaccgcgtcgcctcagcagcagcgacgcgagaaaaggaagcaagcgcacctgaagccggggagtctcagcgcgaggagaggggggttgagctgcgacgtaagcgttcgggagaacgggcgtctggccgtccaggagtcggattcgggtcgtccgtcgttgaggagaaggagcggtcgggacacaaggagagagagtacgggcagaggagaaggaggcgggcggccggaaggaggaggcaacagggaggaaggggcggatcaacacacgccgcgcggtcggatccttgaggcgtcgccgggagtcagagaggcgagcgggggcaggcgccggtcgacggcgaagagaaggggagaagacggcaggagaagaaggagtcgcgtaggagaatcggcgcgtgtatcggcctgggacgggacgaggggttgagggagtgacggtgcgagaggagaggccagcagcagcagcggcgtgaagctcggccgccctgctgcccgcagttgggcgcgtcaaggcgcagcagcccatcaaatcgcgtcgcccgtctgtcgcccgccgccccgcgtcagcaggcccgccgcccctactttatgctttttcaggcggccgccgcggtcgaatcctacgcgcccgtcgcatcgctcaatcttcaggatccgacggccaaggtcaggaaaaggaggaatacaggcaggccgtgaggtctcgccctcgtacgaaagcaagtgcaaaggtctctccctgcccgcacgatgaaagggcaaggtgcggggtctccaacctcgcctttcgctttgcatttaatatttttctccccgcgtctcgcagccatgtgaagggcggcgcagtcgcgctcgcttcacaccctcctttcttgcctagccggatgcggtgagaacgctgaagggatacaaatcatgcaaaatgaatgaatcaatcgcgctcgtcgccgctcggctcgtcccggtcgtcctcgtcctcctcgacgtaagcctcgcgcaacgttcggaggccctcctcgagctcgcgggcctcgtcccggccaaaggcgtcgcccatgccgacgagccgggggtcgcgccgcgtccggacaaattcggcgacgttgtcgaccaggtacgtcaggtagtgccgcgtcgaggtcgacgtcgtgacggccgaggcgatagggatcgcagtcagcggcgggttgccaaagatgcgtcgggggaagggcgccgccagcggcaaaggcctccgagccgtcagcctgtaaggaggggtgtagggtcagtacaagctgcgctggagacatgagagggcgagcgagctcacggcgagaagagggtgcccttgagacctgatcgcgcctgcagcgattcaagcacgagcggcaaagacggcggaggaatgcctcggaggacagtatggctgaagaaaggcgtaatcttggtgtcctgggagatgaagagagatcagaggactgctgaggcgcggatgacatcgaggagggactcaccactgccgacaactcggcggccgccttctcacttcggaagccgctaaagtcccagcggccgctctcggcagcctgagcgtcccagaccgggatgctgcccgcgagaccgaggatttgcgtgtcgccccgccagttgagccggccggcaaactcgctcatccccatctgaccctggtcgcgcttcgaccgcagtggcaagagcgcagacgccagatgggccgacagcagagccgacgtctcaaagatggacgaccggtcgagtggcaaggggaaggtgaagttggcgggtagggccgctgcgggatcggcgagcgggaggacgagggcgttggcgccggtgagagaaaggagcgttgccgactcggtgaagacgcgctgcatgcccgcccaagggtcggtcgacaggccaatcgtgccgagaagaccgagggcgaggacgttgccctttggaaactcgtccttgacgacctcctcgacaatgctcgaggcaaccgcgccaaagccggacgacatgtcgagcccgacctgtacgccctgcaggaggtcgcattcctcggcaaaaagacggaacgagtcgtcgacctgctccgactgaagtgacgagcagatcagatcgacgagggatcagacggggccttcgaatcgcgaagatggcgtgcgtgacgcaccttcttgagcgacgaccacgcctcaccgccctcctcccacttgcccataccattggcaccttcaggactctgcgacttgaagcgcggctcgagcggcaggagcgaccgcgggtgataaaagacgcggttgtagtcggaccagtatcgcgggctggcaacctcgggcggcggcgcctcgagctcggcctccgagaggaacgtctggtagggcgagggcgagatcttctcggccatttggaggcgctgcggccttgagaggttggcacgcacgatggacggtcgtcagaccgcaggcaagtagagaatcatgtggcaccttgggccgggacaaacttgtcgaccttagttgggcgcgcagcctcctcgtcgtccgagtcttcctcgtccgactcgttgccatacaatgcattgatgttggggagcgcgccaaagttctctgcagggcatcggccgtagcgaaagcctcagtatcagtggctgctgtcgtccctgcttcgggctggcagggcaagggcgaatgctggcgctgacctttgaggtcgacgaggatcatgcgcggcatgtacgtctcgtcgcccttcgaaagcgcacagaaggaaggcagccagagctcgtcagcaggcccggcaagagattctgaagacgagcaagagtggcacaaacattacggccgacgccctgccgccagtcgacatcgtgctcgacgccgtggtcgacgtcggcgtccgagtaggcaaagagcgactcggcgacgttccactgatgcgtcgccaggtgaccggcccgggggccgagatgaaagtggacgatctcgcgcatcggtccggaacgacgatggcctgctgcagtagatgcgggtcggaagagagatgaaggcagaggctgccaacgaccgatgattcattggctgggtcgtcgtcgaccagctgcgagccgaagctcgaggcgtcggaggcgctccctcgactggccttcgtctgcaacacccaccagctcttcgacgctcttctcaaagcactcttcccctctttctcttcactagtagatcgtcatggtgcgtcgctctgtctgccatctctcggcggtcgacctcgggccttggctcgtccagctgcgtatgagcttacacctcgggctgctccctcccctccaggctcccccggcaggacgcggacgtggcggcaagttcaaggtcaagcgtggaggtggtcgcaacttcagccgggacacggtcgccgtcgagggcgaggatgcgttcaacaagtggtgcgttcgctctcggccgagcttggagtcggcctcggggagagctcgagccgctcgcacaagaccgctgaccgccgtcgctgtcccgcgcggcccaccaggcagaagggcgacgacgaagactcggaggaggagtcgggctccgaggaggactctgacgaggaatcgagcgaggacgatggacctgctgtaaccgtcggcttcaccgcagaccccaagaaggccgccgccttcggcgtacgtccatcctcgcctcttcacgtctccgcagtctaatatgctgacgccggtctctcctctcacagaacaccgtcgacgaggaggagcaggagctctcgcgtgccgagcgcaaggcactgaagaaaaacaagaaggttgttaagaaggagtcgagcagcgaggaggagagcgaggaggaggctgtccctgtcaagaaggtctccaaggtctcgatcaacgctccgcccccgaagaaggcgcccgctcagatccccattgccgagatgagccgcaaggagcggtgcgtcgtcttgcttggtgcaagctcctgcgacttgaccccgctgaccctggccgatgctcgtttctctgcagcgaggccgcagagaagaaggctgccgctgagcgctacgccgcgaagcacgctgccggtgcgtattgtcaccccttgtacgcactccagggctggaagactgacgacttgagctggctcttttctcatacaggcaagacggacgaggcgaagtcggaccttgcccgcctcgcacggatccgcaaggagcgggccgaggcggccgccaagcggctggccgaggctgacgaagccaagaaggcggcggacacgaagaaggctgcgcagaagcttcgcggctaaggtacacggtgaaggcgacctggcgatcagaaggtcgcgagaggggcggcgaccgtcctctcgaactcgacgtgcaatacaaaagacctatcccagcggaccgcagcgagcgcggactctgcacatcctcaggctgcttgctattcaccggcttgctctcgacgtgtcgacggcgagcgaccggccgtcgtcgtccccttaatcctgcggctgcggacggagagacgcgcgcggccctcgctcctccttcccttcctgccctcacctcctccagcagcttccgctttcctccctccccacctcttcgcctaaacgtctgaccttcagctcagattcgacgtcttcaaaccctcgctgcacaccaagctcctccgttgctggctccgcgtcagctctcgccaactgcctcgcgatggcatccccgttgccggcgaccgagaccgtcgtcgacctgaccgcagacgacggcgacgacgagcctgtcgccgccgccggcaccgcctcgtcttctcgagcctcaaatgagctccgcagccgttcgtccaccgccaacgtttcgccagaaaagcagttcctcgacgccagcctgcgccgaagccagcagctgctcgcggccaggtcgccgtcgcgaccactggccggcgcgtcgccctcccagccagctgctggcggaagcgtaggaacgtccccgatggcttcccgcttggcatcgccgtccaagcagagctcgaaggtgcgtttatcacgtccagctgacgcgcatcgacttgagatacgaggatggcccggctaacccccttcgcgacgcgttgtcttgctccggcacctcccccctctcgtttagagcgaccacgctccggccgcagctccgtcctccagccacagcacgacggaaaccttagcgccgggtcgtaagctgtctacgccagtcgtgctatcgagctcgtcttcggtcggcgacgcagccgaccctgagccccgccggtcgtcgcgcacctccggcgccaagcgcccgtctgcgccgccggcagcccctaagccagcttctcgcagcggagcgtcgtccgaagcggtcaaccccggcctatcgacaagcgtccactctgcggaggtggaagccgagcccagtgcgccgcgctcgccgtcggtcgtcgtcacagccagctcgcacaccatccaaactgccacggtcagtcgcgtacagacgccctcgcccaagaagccggtgccggctccgtactttgccgacctcggatcgacgccgaaggacgtcaagccgattatctccttcattccgccgagcgcgcaacggccgctacgcgtcattaaggacgacgccggccaggacatcatcgatcttgaggacacggacgacgaggagcagagcgacggcggagatgacgacgacgacgatgacgaagacagcgacggcgacggcgtcggagactctggtggcgagcctctcggcccgtcggacggggagggcctcgggaccgaggacgacgggcgagcgacgggcgacgacagcggcgctgaaggcgacgaggacgacgaagaggaggacgacgacggcgagacggacgccgacatttcagcgatggagatcgacaatcacctgctcgacggcaccgacggcggcgcgcttgatccaggcgggctggaggccaagctcgacgcacttcacgaggccaacacctctccgaggccgccaatggtcggcacgccccagcgcaatgccagcgccggcccctcaaaccacaacggcccgcgcgtacccggtttccagtctggctcgtccgatttcacgagccccgcctcgtcggttgtgccgcggtcgggcgtcgcgggcgcgaaggacagtgttcaccatccgatcgtaaagaagaagatcaagcacgctcgggccaagtcgccgacgatgccggccgtcccggtcaagcccgacatcacgctgcggctcgagcacccaatcaaactcaacgagtacaccgaattttcgctctacgagaaggcgctcgacatggggcagtacgacgaggcgacggtcgcccacttctcgcccagccgtatcttgcagaccgtccaggccaagcgcgatctcgacgtcacgcagagctcgaagaagcgcaagcggtcgagcggcgtcgcactcgccaacgagacgccggaagagattcttgcgcgaggcttggaggagaaatatggcgccaagaaggtccgtctgcggagccgagcgctcgcaaggagttgcgtcgaaggagatgctaatgaccgcgtctcgcttttcttgcgcacccgcagaagaggcacacggtcaacaaggaggactattacgacctcgacgacggctttgtcgacgactcgacggcgatggttgatgtgcccgagtatgcgggcatcccggtcgaggagggcttttacgtcgctgtcggtgcgatcgagctccggggtgaggaggaggaggagttcgtccgctcaagcctcgcgaactcaggtcgttgcgtacgctgtgctgacctccgctgcgtgctccgccagccccgacgagcgccactgccggaagccgcgcaagggttcggtcgactcgagctctgatgcggcttccaagcccaaggcgcccatcaagcgccggcagaccaacctcagccacctgcttcatggcgacgatggcgcatcgaccggcgcggggcccgacggcatgcagggcgtcgagataacagacggctacgccgcagcggcaacctcggcacccatcccgtttacgagcgtcccgctcagcacgcccatctcttccgccccggctgccagcacttcgatctcgatgaacggctcgttagccgtcccggccgctgcgactacgaccacggcgcctctaccgcctacatcgccgttcaacccggtcgtgctcagctcgggttccacgggcgaggcacctgtcgaggcgccggtcgtcaaggtgagcaatcaaacacctggagactctgtgtctcagctaagcttggcttgtcccttccaggcggagccgtcgctttcgcagcgcccaaagtcggcttcggtcaagcccgaggtgcgtgccgctcgtggcaggctcgattaacctgaccattgtctttagctgaccgccggccttacgcactacaggtgccgatccccacgccgctgattggcctggtccaggagctgcggcagaagattaaagagcgtgcgtagaatcaacttgaccttttgatccggcgcccgtctcgcatttgctgaacgcgctcttgctctatcctctagacgactggagcaacaagaaggtctttccggaacacctccggcccgtcattcaccggctggtcgaggccgcgatcaaagttaactggtatggccaggattttttcgacctgtcagtgactttcttatccctcgttttgcccgctcgatttcgactcgtcgactgaccgagctctgcacccttctcagcatgcccaagatcttcccatacaaccgcttcacgatgctcgtacgtgcgcatcgccatctccgcccgcggtcttccagtcactgacgcttcactccttccggccgctgcagaaacgtgcgatcgctcattacgagccgctctgcgagagcctgccgaagctgactgcttgccgcgcctctccctcagtcatccgtcgtcaggagtttcactttcacgaggcgcttctgcaggagcagcgggcccggctcgtcgagcagtggcggcacgaggtcgacgaagaggcaaaaatccaggtgcccaagtatcaggctgcgctgaaggattggggtgagtgtcctatccgtctgcgcccgcgactcgctgctgagccacgcgtccgaccaacagaggagaagaagggtcgcctcccgttctcgacaaacggcccacccggctcaccctccgccgtgacgagccacacgcctggcgccggcgcgaatacaggcccgccgccaatcctgcctgcaggccccgctccgactggcttcgcgcccggcggtccgaccgaccagcactcacctgatcttggcctctcccagctcccattcgtcaacggcggccccccgacgccgagtgccaaggcaacctcggacgagaaggcgccgcagcgcaagatgcggctgacgtccagccttcgcgagacgctctggacgcttttcaacattacagaggagattctcgagctcacgaacgagttcaatggctgggagagcaagaagcccgagtctggcctcaagctgcgcaagacgctctactctgacgtaaggcttcgccgacgtggctagcctgctcgaccggcgctgaccatgtttgcttcctgccccacagcttgcgagctgctttccggagggctttgtccatacgaccgacctctcacgagcgggtcagtcctgggccttgccgaccctctcgacgactgaaggttgctgacgagctttctcctcttcccctccccgcagtctcccagctcaagctaaagtacgaccggaaggacgagccgctcgacgactgagcactcgaaagtcgcccacttcgatcgctgctgccctcatgccccatgacgtgttccgaccaccgaccggttccgcgaatggtcaagcaaaaagggggctattaggtgtgcaagcgggcggcgcaataaactacaggcgcgtacatgcctccgacgaaggctggtggatagtctgggcgggaggacaaagaaggaagggtgcggtcggccgtatgggccgctcggagcgacgggcggcgatgtcgaaggcgaggttcggccactgctggcggcggcttcgacaagggcgggtgcgctggccggcgtgctgaccctggccgcatgtatgcgcccgttcgggcgcggcgaggcttgatggccacgcgggccgtctcgcgggacgcccgacggaaccgccgctgccgagccgagggctggcagggcaccctgttcgccgcgcggcgaggagcagccatgcttgaggctgagagggccaagaggatcgtccagcgagcgttctcagtcggcaccgaagccgctctcgcgccgctggaggccctcggtctcggtctcaatccggccgaccctcgcctcctggctccactcgccacgaaggagcctgccagcttcgtcggcgatccgaccgagcagccgcttggccggtccgacgcccggagcgcgccagatccagcgcccccacgtccgcggccaggcggcggcgatccagcctgcggccgggtttgtctccaccggcgagtggtgaccctcctggatggtgacgaccgtcttgggcttgaggaggattggcaggagcgacaggagcgagagcgagagcagcttgacgatgagcgagggcgagcgtagaaacgacgagagcgactgggccgagtcggacgagtctgaggtgaactgaataatgagtgcaccgagctgcgtcgtgacgtactgtcaaaggcggtcatgcgagcgtcagtccctctgacgcgggttgtgtacgcggccaggtcggatgactcacgttccagctgaggccgccggcagcaaacgtcgcacagaagacggtccaccgcacgccgacgacgccgcaagcgacgttcatgccgctccacggaacgaggccggtcgcacgcatgacgagcagcttcttccaagcgccgccaccagggctggcaccggaagacgcaagcgaggcgcggacgacggcgagctgggttggaaagaggagggtgatgaggggcgagagcgggcgggagaggaggtacgagcagtagccgccgatcgtcgtcgagagcgtcaggaaggcgacggccggaacggcggggaacagggcgcccatgaggatgttgaggacaaccgagccaggcacgctccaggcgtgcgtccagacgccgacggccccgagcgcggtgagcgtatgcatgtagcccgcaggcgaggcgtccatgtaggccatgatggccccgctcaagagcttgatgtcagccccgctcttgggcaggcccccgcggagcgagggcgggagcggcagagcgccgagcaggccgaccatcaggccgaggctgaggaggaaggcaaagccgatcccgagcagcgtcggaatcatgttgcgcgcaagcgagaggatctccttgcgcgtgacgcgcttggccgaggtcgtcattgtcgtgatgccgtcctggtcagcggcggcttggacggcagccgaggacgagaagaagttgaaggacgacgagagcgaggcagagctgagggccggcgttggcagcgacgggttgaaaaagtagccctgggaggatgttggcgtcgagccatcagtcgccggcggtgtcggcggggccgccgtgaaagagagcgtcggcttgcgcgagagcgacggcgggaagccctgcaagggcaggagcgggaggtggatctgcgactggaccttgatcttgagcgacgagtcggagccagcgtcagacgagtcgtccgagccaatcgtcccctcgtcgcccgagtcgagcaggtcgtcctcctcgccaatctggccgggcagcgactcgacccagccaccgacggaccgcctgccgccgtcgagctcaaagccctcctcgcgctccttgcctttgaagcttcctggcccggaccaccgttcgcctagcgaggcacttcgcgaccgggcgccgccgctcgacggcaagacgagcctgtccatgtggttcgagtaaggcttgtcgggcgtgtcgggctcgggcaccggcgcgaggttcgaaatggggtagattgagagcgtcggcgcacgcgaccgagcgtaagacgacgcgccaaggtgctggggcgacgacgacgacgacggctgctgctgctgctgatggtaatgatggtggtgctggtggtggtggtcgcggctctgcggagggagcccgtgcgagacctggagcgagggcgagaggaggagcgacgaggttgacagcgacgcctgaggcaggagcgggcccgggttgtcattggccgtgatagaccgtcctctgcaaaggcggccggaagggatggaagcagaccgacggccaggcgaagcggttagacaagagggggggagggcgtcatcccggtcagctcgtgacacttagcgagggttcgctcactcgctcgcctgaagcggcgcgggtgcgagaacaaacggacctcgaccgcatcctgttggagaccggacgccgggcagtgttgatgccgacgctcgagctgctgcctggcgaatcggttggcctgagggagcctgcgctcggcttgcggtcgagagtcggcggcggcggcggcggcggcggggctgccgagggttgtgcggtcgacgtcgtcgtcgttgacggcggcatggcggcgggacgcttcacgagatcgaccaagcagggtctcgttcgttcgtgcggggttcgggctgcgaaggcaattgggtggaggattgacggatcgagggagaggggctgcgacgcccgagctgccggcgccggcctgtcagcaacccgctgctgacgcaggcgagccgacagcagctcgcccgaagctccgccctactacagacaggagccgactcgctcgttctcttcatctctctgcgcgcgcctgagttcgacatggcatggcaagtcaggtagatccacatgctcgagcgagacggaccgagttacgcttcttgcggtcgagctctcggcggccgggcaggcgttgctgctgcgctgcagctgagccggcgaccgagctgctcggccaaacctcctcctcctggccgcccgcccgacgccgcttacccagcggccgaccgaccttctgcccgccgggacggccgctgacggagcgccagcgaagcggcctcgagcaagagctccgccccccggctccccgtcggcagtccccagagccgacatccctcgcgcgaccgccctgtcgtacctcttccggacgctcgggacgacgctcggcgtcgccctctcggcggcctaccagcaggcggtgctcgtcgacgagctcgaaaggcggttcaggggcgtcgagggcgctggggaggtccgtctctctcctttcctccttctcattttcgtcttaccgctgaccccccttttcgcccctgaccgacaaccagacgatcgcccacctgattcgctcgaaaacctacctcctcgcccttcccccgcccgcgcgcgctcaagcgctcgaggcctacgcgctctcgctccgcgccgtcttccgcgcgatggggctcgtcggcgtcctagcgctcggtgcgggctggggtgtcgagcagagagggcttggtccgttccttcctttttccctcgcttcttggttgcttctcgcgtgagaggggacgcatgggagagggaatgagctgacgcaacaatacactccatccctgcgatcccttgcgcgctccaggcctcgcgggcgaacgcgtcggaggcggccacgacgagctcgacgacgacgatggtgccgagccagcaaacacaacagcaacagcagcagcagcagcagcagcagcgaccgcactggtcgtcgctgagggcacggctgtacctgctgctgtcggcggtggcgccggcgccggcgtcatatctgagggaatcgcggaccgtgagactaggagcgagggagggggtgcgtacggctcactgcgagcggggtgagtcgacgagccgatagatcttctgcgaaccttgcccaggcgcgaatgaaagagggaaggggcatcatggggtcgtttgccaagggatgagcagccaaaagaaaaaggacagcgaggacgggtgctagtctagaggacagaaaagacgaggggaggaagaggggtgcggtggaggaggatgtgttaaaccgagcgagggatctattaaggggagagggggggagcgtgcaaggctgccaaagcgaggacgtgaagagagacgaggagcgtgaaggacgggaaggagaggtgtagagccggatggacggacgagagggaggccgggaggagaacgaggggtgcatgaccgtgacgctgcgagagtgagcgcaggaggtggagggtggagagtcgtgagagcgtaaaggggcgtgagagagagaaagacgaaggaggcgagcaagctcagcgccgacggtggtgagcgtgctgcgacgggtggtactggagtgccgaagggtgggcgtgctgctgctggccgtacgacgccggcgcgaccgacggacgaggcggcgattcggccgggtagaagaggccttcgaccgggtcgtacgagccgtaggtcgggtggccgccgtcgtgcacgccggccccgccctggctgccttgaaagggcgcgtagtgcgcaaagccagcggaaagcgagccctgcgaggcggtcggcggctgcgatggagccggtgcgcggtagaacgagctcgagggcgcggccggccgatagtaagcctccgagtagtgtgaggactcccaggggccaggagtgtagctggccggcgtctgctggtgctggtgctggcgcgagcggtcgtacgcgagtgaggcggcaaagcggtcgtaactcgggaacgaggccgggatgacgggcgaatctttgagatggggcgtcgtcaggccggcagaggatgacggcagcgggtgctggagtggcgggatggcgtaggtcgcggcgtgcgggtagccaccgtcgtcgccgtcggcgctgttggggtgatcgccgtcgtcgtccatgtcgtacgtgtcgctgtcgtcgccgtagccgagaggttgcggggggaggatcggcgactcgtacagcgacagcggggccgagaaccccctccgacttgctggctcgaccagctcgcgcggccgaccgcgctgctcggatgaacgctcgtcttgagacgaccagccggtggccgagccgaggccgggcggggtgtgcggctccttaagcgaggagggcgagaaagagtcgttgtccgagtggccgctggcatcgatcagcaccgtcggctgggccgcacgcgggtggcgagtcatcggctgaggtcgcgagcgcgacagggaccgtcctaggttggcgtcaccgccgctgccgacggtcctcgaccgctggcggccgccaccgccggtcgttttgcgggggtcgggcttgagcctgagcggtagaagcggctggccgggcggactctgcgggtagggctggtagcggccggccgaccgcggcgagacgatgcgcgggccgggcgagttgagcgacatgtcgaccatggccggcggcgcgagcgggaagccggccgagctaggctccgtcttggagaatcccttgcccttggagacgccctcgagcttgggcggagccctcttcttgcccttcttggaggtcgtaccggcggctcggcgggcagtggcggcgacgagctgggcaagatcggcgccagcctcggcaaagagtgtcgtgccccgccaagcggtggcaagagtcttgaggcaggcgaggccgaaacgaatgtcgcgctcgactgaaggggcgtaaatacgaacctgtcagtacaaggacgtctgcgacgggcagaccaagaaggcgtgactcaccgctctcgtgctcacccgcctcgccatcggcgtccgcaagctgcgagtataggagcgggaagagcgccatgaagacggtcgtcgtctcctgaacagtgtagattgagcgcgggacggccaggcggttggcgaccggaacggcgacaacctgccgggcgacggcaagctgcggctcgagcgagaaagcgttggtcgccagatggccacgctgactcgatcgagggagctggacgcgatctggaagcaggcacgagccggtaagggaaagtgccttcacgagcgtcgagacggacaaggacgagacgtacaaacgaggaggcgcacgtcaagcgcgagattgcggacgaccgcctcaaccgcttcggcctgctcgtcctcgtcatcgcaggcattgtggtcgtcaccgaacgtccgaccgacctcgtcctcgataagcgagagctcccagagccagccctcaatcgccgacgctagcatcgtccggacgccggtcaggcgccagtcctggctgcggtcgcgcccgggcgggtagaggtccttgacgacgcgagcgccaaggtcggccagcttgcagaggaggatgaagccagagatacgcgcagccgaggggtcgtagtcagcaggcaggagcgcgttgtcgtcaaagtagctgaggcgagggggaaggagagagatattagtcagcggacgccgacagctttcctcgcaacgcgacttacctcgcccagagctcggtgccctcgtcgaccgtgagcggcagtgctgggccgcccgtcagcggcagagcgatctggaacggcttgccgaggacgcggccgagcgcgcggtcgagattgaagaggcacctgcgagggcaagatggtcagccatgggcagcgtctccgcaagcagcacagagccggcgcaccagaaggtccggcagcggatctcggcgtctacgccgtggccgtgtttggcgctgagatggaggccacgctcctgcaggagccgagcgccgtacttagaggccgtccaagctcccgataggtagccaagcgaggcgaggtggttcgagagaagcgccatgacctggactggaagcgagcaattaagacaactcagtcattgatggagacgccgggcaacgaaaacgtcgatcgtcggacgcactctggtgcagctgcgggctcgaggcgctgctgctgtagtggagcgtcgagaggtgcatgctccggatcgcgctgcaaagccaaaggctagggtcagttgcgggatcggaagaaagcgcctcgttgagacacacagagtgtggtagcgcgcgctgacgtcggatgcgcccgaggccgcgctagccgcacaagccatgacggcgaagaggaccgagacgaattgggcgacctcagtgtcgagctgcggtcggcacagagaagacaagttgaggtcagcgcgacgttaaacagagcgataattgggcagcggaagcagcgcaccggtgagcggtgcggctctgccgcggccgtctctgcaacgccagcgctgcgcgaccacggaaaccagctcttcaagtcgcgctcattcgtgtcgtcccagagaaggctgagccagcgccggacctgggcctccgacagcataggcatgagcgggtggagatgctcgaagaagaagtcaacctatcaacggagatcggcaagggcggtcagcaagatgaatgcgaaggagaggttgaaggcagtcgaagcggcgcacatgggtctcgcactcggccttggttggcagctcgccatcgtcgtttgcccgatcgaacgtttcgctccgcgggacggtcccgctcgtccagacccaccggccggtgacgtcgaagccatactggtcgtaggcatcaggctcgttcaggtcggatgcgacggtcgagagatgggcgaggaggagcgagtcggttgcgttcgggatgaacctggacaagggggtgagaggatcgacgtcagtcagcgtcggcgagcgtcagtcgtcttacaaggacgcactcggcgccgttgtcggtctggtggctgtcgggcgggcgattcaagatcagcaagctgagagagagacgccgttgcagaggagacgaaaggacgcaccaaacacgcttaagatcctcgaggctgccggcaggtccactgccgccgacgcggccatcgagtcgcccgaggcgcagcagtgcagcctcggcgtcaactcccgacccttggagaagcgctaggacagcctcgggccccatctgctggcgcaggagctcgttctcctcgttccgactggcaggcaggcatggattatcaggaagggaaaagacgtcagctcattgaacaaagggaagcgggcgaggatggtgcaaggtcggcgagagtagggagagggtggaggggagctcgccctccggagatggccgcagctggggaagggagggaagccgatgggactcacgcgcgcgactgggcggcccggtccttggccatgttgggcgccatctcgcagggcacgcccttctcccggcagagctggcagctgccgtcgacaaagttgatgcagcgggcctggaggccagaggtaaggaaggccgagggtcagcgctgcgatggaccgtatctgcccggccggtggggtgacccaacgaaaggagggccgagcgagggaagcgcaagagtcgcaccttcctcttgcgacagccctggcatgcctgagcagctcgggtcgccggcgtcgccaggaggccggacgggtccgccagtggcaagagcggtggcgagggcgaggacggagccatcggacgggaatgatagaagggcttttgctgcgggcggacgaggaaagaggagaggtgatgggaggagcaggctgtttggcgcggaagaggtccgggcgacgctggcgggtctgtgcgggggtggcgacagagagagagagaggagacccttgagagaggagggcgaggatgggagagggaagagaggacgacgacgagacgggcaggcctttgaccggcttgggacagagggtgctcgtcgctggggcagacgatgcgaccatctcacttgttgggcgctcggtgccgccgccgaccgccgcttccctttctccacggctcggcgcacatgcagtcagcggcaggtcagcgacaggaggcggttccggccgcaccggccctttcacacgcccactccgccgccgccgccggccgggcagtgctaggccgagcggtggccgaatgaactctgtgttatctgctggctctagctgactgccttttttcagcagcagcgaatgcgggatgagggcgacaagagaggtcggagggcggagggaagcgtcgacgagcaaagggacgacgtctctaccgcggccagcctgtcctgccctccccctttgtcccgcagcagaaggcccactagcgacgtacgtttggtttggcagcctttgccccgcatggcccacgcacagcggacgtccgtgccgagaggtgccggcgctctctgcatgctcggaagcaagctgtgaaagggagcggaggcctgctccttcacacaggggggcgacgggcttgccggccgaggtgaagccgcctggcgagagagcgcagatagacaggggcgcggtcatgccctgggccgtcgaggccaaccgtcctgccgacaatggtccgcgatagcagcagataattgagcaggacaggaccgcgctcgccgttcgtcttgcctgcgtgcgaggtctggccggggaggggatgttggttgaccagcttgccggcttcgcctagcatgcccaccccctgtcgtcgttgcagttgtcgcagaggcggccagcaggtcgcagaggcggccagcaggtcgcagtagcgtctgccagtcttgcgacgacctgtcagcgtcgtccgaaatctgtcagggaggaggcagctgagcgagcggccggtgcgatggtcggtcgcaggcagcagtagcctggcagctggcggcgacgacggctcccgccgcgcctcgtcgtctctgcacgagtaccgcccaccagccggccatgcgtacgccgcccggactcgcccgctctcctgaagcctgccgctcgagacgctggccctcattttgcgacgacgagaggcgactcgacatgcagaaggaatcgcagcgtgactgcgctctgctggacgtcacttcgcccactcagtcctggcgctgacgcgaacgaacgagagcggaagatggagagaaccaaggggcatcgcattaagggaggggtgatacacggcaggacacagacacagcgcaagtggcaagggacggggatatcgtcaaaggcggaagagaagatgagaggggagcgccaattagacaatgtcaaaggccggcgacttccagttctggccctccttggcgagccgctccttggagaaggtctcctgggcggtcgagtgaggcgggttgacctgggggatgaccgagtccttcttctcggtgacgacggcaaactgcgagtcgcgctcggccgccttctgctcggccttctctttgttgtgctcggccttctgcttcttctggttgaagatgttcttgagcgtctcagcccgggtcgtctcgtccgagtccttggcctcgtccatcgcccgcttgacgccgacgagttgctcgtcgacgtactcgaggccggtcttgatgccctgctcgatcgccttggcgacagccttcttgatcaggccctgcgcgagcggggtgacaaccttgtagaggaagtcgtgcttgctctcgcggatcgaaaacttcatgttgtcgactacaagaagaagagagagacgtcagcgagctgcgtcgagaggtggacgagatgaagcgaggaggctcaccgtcggcggtgacccgcttgatgaggaaggcgtggtcggtccgcttgccggccgaggcgagctcgatctcgaccgagacgccgttgcccgagagaaggacgtccgcgaggccgcggtcagagagcttggggaagcccgtcttcttcttgaaggcgaagccgacatcgcgcatatcggcctggatctgctcgagcttaatgcggaagcggtgcgacgagtcgtctcggatcgtcttgtagggcgagaacttgatgaactgcaggcggaaaggtgagagggtcagccggttgctcgagagagcgagtcgagcgaaggcacgcacgttgtgggcctcgagcgagacaatgttgggcaggaggttggtgccctcgaggacgaggttctcaataacgaggtcgacctgcttgtcggtgtactcgatccgggggatcgggatgtagccgacctgctggatgagggagggaaggatttcctcgcggatgtcgttccagagctggggcttgaactcgagcgagccgttgtcgtcaaagaggacgtccttggtgagccgcttccagtcctcgccaaagcggacgttaaccgggtcggtgcccatcgaccggaagaactcagagatggcgttgaagaggttgtccttgtgggcggcgtaccggtggtcaaagaactgcttgcccgtccggcggagctccttgccctcgcgggtcgactcgtcctcgagaatgtatccgggctcgacgaggcacttgcggacgtactgcgacaactggttgaaccagtgccgaagctccgggtcgttgtcggcgtcggtgtagagcgcgttcacggcgttaaagatcgggtccatcgaccggccgtcggcgaaacgctcgaggagcgtcttgaactcagtgtaggcctgctggaaggccggatcctcggcaacggcgccgaccgagtcgccgcccttgttggcgaggtgcttcgagtggcccttgtaggtgtcggccttgtcgaggaagaagttgatggcgtcgtcgtagtcgttgtgctgtggagggagggaagaaagaaagtcagcaattgacaccagggcagcaggcggcgcgcaagcgagagactcaccttctggcactcaacgacaaccttcttgagccggtagatgaactgctggcggcgctcctcggggaactcctcatcgaggaagtcctgggcccggtcgcgctgctcgccggccttgttccgcttgtcgtcgttgggcgagagcttgtccttgaaggcggcaaacttcgacttgaggttctgcttgtcgccctcggacgtgttgcggtcgacctcggtctgggcctggtcggcccgctcggcgccgcgctgcttgacaccgtcgacgccgccctcgcggtaggcctccttgccctcctgggcagcctgcttcatgccggacgcaccctgcgacttgacgtcctgcttggccgagtcgtactcgtgcttcttctccttggcaatctgggcagcctcgccggcgttggtctggttgccgtgggggtcaatgtgcttggtgccctcggcggcaggggccttggggtcgtgctcaatcgagtgaccgccaactttggcctggagaatcggggtctcgtccttgccgacgcgcttgccgtccttcgagatccactcatccgagggagcctcctggtcaatctgcttgagctggttctcgtccgggcgagccttctcggccgtcttggcggcgaccgaggcaaagaggtcgcgaccaacgagacccatctgagagagcggacacgagacgtcagcggctagtcgactgagcgcagagcgaaatggaaggggctactcacgtcagagatgaccttgcgcatctcagagttggtgaagacgagcgtgaggagcgtccggaggtggacggcggcgttctcggcgtcgttcttgacggcatccttgctcgtcgggagggcctccttgccctgggcgccgcggctgacgtccgtcacctgggtgtggtagacaaagttctggaaaagctcgtcgtcattcttggtgaggatcatgagccgggccgtctcgatgatgtcacggatgtcatcgacgagcttgcggccgtcgggcgaaagcttctgaagctgcgagatgggaaaagagcgggggcagatttagcggctggtcttccggtaacgatgagaagagagcgggctcacgttgacaggcgaggccttctcggcgtagagcagggccttgtcaatctgcttgttggtcgggagcgagccctggcggaaggcctggaagatctgttgaggggcggcaaggcaaagggaaggcaggcggtcagtcaaactgagaccagggcgacgtcacacggcaggccgcgaagaagggacgcacgccgtagagcttgagcttgcgggcgacgtcggcgtccttgttctccttgacgacgggagcggtgacggcgtccttggccgggtgcgtggcgacctgctggcgggcctgagggatagtcatagctgacggtttggttgcgatgggtggcgggttgcgggttccggagagagtgagatggggactgcgagagtcgagtcgggctgggcgggacgacggtcctttagggatacagtgggagtggggggttggaggacgagaggctttacaagaagcgagaaagtgttcgtgagttgggtgatgtggtaggaaggggaaagaagggacgaggcgagacgtgccctttgaaggttccgtcttctccctccgatgccgctgcgccgtgggctgagatggagcgcgccggaaaggcgagatgacgctgttgctgctgtcgccgcaaccgagacgcttgtttgttgcgcgcgaaagagtctagaccgggctgcctggacgtcgtcatcgcaggaagacgatcgagaattcggccgtcggaatgtacagccgccggctgcttgcaagacgacctgctcgactttgctgtgcgcagaaggtgcgacctggagacaggggtcttgaggcattcgtacactgccgatgtcgcctgtcctgtctgtcggccgctgctgagtcggccggctgggcggttcgctgcggatgcaccgagggtcgccctccggactctccgtcgccggagagagatgcgaggcgacacgcgcgcgcacgcaacacagacagctaccgcgccgtcggtgcagactgaaagcgcgccgggaaatggacccgcccgccgacgaaggtcatcacgtcgacgtgcagtcgccccggtgaccggtcgcgggacgtaaaagagagacgacgacgagcatcacgagtgcataggatccggccggtcgcgagcgcgagcgggcgcgacgagcgagagagcgagcgagcgagcgagtgcgacttggcggaagcgctacgagaggggaggacgcgagccgtctatacgaactcagtggtgtcggccgatgcgcgagcgcagccggacgcagcgcagggccggccatgctggtggcgacgaacaactaggcacgtcgcgccagttcgcgctacgtaaggagggtacggaagggaggctcggcgttgtagtcgttgcgccgccgacgagagcgagggaccagtcaccagcccgagagcaccattctcggaggtttgcaacgtgggcggtccgtcgggcagcgttttactggtagatgaagcggtagctgcataagggcaagcgattgagcatcagtctcaggcagcatcctcctttttggccgcggaggggacgtaccgcgacagaaggtgagggatggccgacagctgcgggccgtacctgcaaggcgcgatgcgaacaagggatcagcaaggcagacgtagagaggtttgaaaaggcagcgcaccgagccgagttgtcgtagagctcgaagagcgggacggcgagcagcttcatgttgcgcgggatgctgagcacctctgcgacggagcgcgagggcgaacgtcagcttccggttgcgaaggtctctcatctcgagggctaaacgacgcacttcgctcgggcagctgaacgaggaacatcttcttgcactctttgggcttggtgacgtgtgccgggacgtaagggtactgcggcatgcaaggatgctcgccgtcagcgacggccgtccgccttacagctaagcttggggcgagattagaccgaccatgaacgtctcaaacgccggtcgccaccactgtgcgagcgtgtctccgatctcccagtcatccttcacgaaggacaagcgcgtccgcgtcagctgtcgacgccctcggcgggacgggctcagtcgtggctggaacgtacgacctcgtccgccgggccgtccgacgacagcgacttgtccatgcgggccttcaagccggcctcctcgtcttcgccaggctgaatgtagtcgccaggccttgatcgggggcgaaagggaggtacgggcgcgcggtcagcctctgagccgcagcagcacgagcgaggtcagagggttagctcgagctacggcagccgcgacgcacagcttgaagaaggcgtttgcgatctggagcatgagaacgtgcggatggccgtgatcctggtcgtgaacacagcagggcctgaggtggtcagcctttggccagctcagatcggccgcctggctcaacaggagggggaccgacgtgaacgagcatgatgccctcgaccgtccggcgcatgccgctctgctcatactggctctggaggcgctggatccgggcggcgacacttgcgtcctcctctggctgggcctccttctgactgtgtgggagggctcatcgccttggtcagtagccgctcgcgagctcgaggagaaggggctgcgacggacgtaaaggtgaagttcgaaagcgggtagctggagcaggacggtcagtctcttgccaggtcgttaggtcggtcaggagagagaccacgtacagaatgagtgagcggtccgacatccttgctggcgatcgtaagactggcaggagggctgggggaatggcaagggaacgagggtcgacgtcgcgcgctcgacatctctccgccgtcgcgtctctcctgcgcctcttcacgctcgtgagtcgtcgcgacgcatcttcagccagtgcacttccaacacgagacctcggccagcgtgtgtcgcctagcagagtagcaacaaggtccatcgcccctaacgctcgcaaggacaaggttggaaaggcatcatcgatgggtgcaaagcccgtcgtacgacagggcccgcgagaaagggtcaagaggtgccgagctcctccgtcaggcgagatctagtgaggaacgaggcgccgaaaagagaggtgggaaagggatgatctagcgcgtgcccatcgtcgagccaccacggccacgcgaccacttgccctgaccgggcacgtagcgctggggcgcaggcttctcgaccgtcgtgaagccgtcgtcgccgttggcggccggagcggcggcaggtgcaggctcggcggccttgaaaggagcgagcggcggagcgacgggtacggcagccgccggctcgggcgaggcggcaggagcagcagcaggcgacgaccggggagcgagctggagcttgcgccgctcacctcctccgaacgcaggcgagcccgaaggcggcggcgccgaccgcttccacgagctctcggttgcggcgggggcagcagcggcggcgggtgccttgcgtcgggcgagggcctcctcggcccgctgctcctggagacgaatcttctcgaggtcggccgcccgctcggcctcgcgctgctcgcgtgcggcagccttggccttctcctccgactccttctggcgagcctcgatctcggcccggaccttggcctcctcggccgcgtgctcgtcctcctcgatccggcgggctggaaacggcaaggagaagcagggtcagcgacgcagcggaggataggaatggaaagcagcacggaaggaactgaccctcggcctcagcccgctcggcctcctcgcgctcgtaagcctcctcctcctcctgctggcgacggcgctcctcggcccgctcggcgaggacgcgctcgcgaagcttagccttctcctcggcaatcctgacgtcagcctccttgcggcggcgctcaaactcgccggcctgggtgcgcgtaatgtcgtccttgaccttgttgtagtcgccgagcatgcgcgcgagccggttcttgagcgcgaggtcggcctcgtgcttctgcttggactcttcgcgcgtccgcttctggagcgactcgtgcgccgcacggtcgtcggccttctgtcgctcatagtcggccaggacgagcggaatctcctccttgcggaaggcgcgctcaatgtggtcgacccgcttggcgatgatgcgcaggcgctcagacgtctccttcttctccttctcgagctgctcgacctgaagctggacgaggccatcggtgtcgaggttgtcgagcgtctgcaaggaagagggcactgtcagcgactgtacacagccgcaagcgagagtctggcccctagacgcaccgaggcgtcgaccttgaggccaccgcgggccttgagaccttcggccatcttacgagcctcgtcaatcttgacctgctcgacctcgcgcgcgatccggtcgcgctgcatcgtcttgtagtcctcctcctccttcttcttggcagcctcgagcgagagccgctggcgctcggccttggcggcagcctcctcggtcgcgcgccggacattgagctcgtccatgagctcccgccggcgggcgataagcgcccggcgggcggcggccgaagcctgctcggcgacggccgacgagacggcggtcgcaaagagcgagcgttgggcctccttggcggcagcgacgagcgaggggtcaatgtagtggacggtcgcgcgaagggtggccgcgaggcgcgagagctggctccggacaaggtccgatgccggcggctggaggagaccggccgtggcgggcgagatggggcccgagagggcgttgaaggcggtcgaccgggcggcggcagacgactcggccttgaagggctcgtcgaggaagacgatcgaccgctggacgtggtcgacccggacggcgagctcggagcgcttgcaggcggccatgacaaacttctcgacgtcctcggcctggagctcgaaggacgcgacgagcgagaggacgtggtcgaccgagacggcgtcgtagacctgcgacagctgctggaacagccgcgagaggacgacgtgcttgatcgggccggcgtattgggcaaagtcggccgaggccgagagcgaggcaatgatcggcgccgtcttggcgcagatcgagagcgggtggaagtcaacctcgaggagcgagtaaagctgggcgagctcgggcgcgacgcgcgaaagcaggttccggtcaatctgcagaggtgcgggagtgttggggcgtcagcgctcaaactcggagagaagcaggaacgaatgccagcgcgcgccgaactcacggcctccttgatcaggccggcgcgggtcggcatcttttggaggttgaggagggtgacgagcttgccggcgtggcgcttgccgtcgccgtcctcgacgacgggcacggcgagagccgagaggagggcaaagccggcgagcttggcgagctcgggctcctggccggcgaggacgccgttggcggcgaccttgagggccttctcctggaacaggccgtagcgtgcccaggcggcggcgtggaagacggccatgtagccgccctcggccttgaagacctttgtcagcttctcgtagtacgagaccatcattgccggcttctgggccttcttgctggcggggttcgcgagcaggccttggatgtcctcgaccgagcggaaggcctcctgccagagctcgagctcgaccgcgagtgcgagctgggtgaagcgcgtctcgatgtgccgggcgaggacatcggcgtcgctgaggttgatcgagttgccctggtgggcgtacttgttgacggtcgcgaggtccttgcggatcatctcgcacagccggcggaattcggtcttacgctcgttgtccttgcagaaggtaaaggcctgctggacaatgtgctggtagatgatctcgagccgggcgctgttgcggagcgtctcgaggcagacgcggaggcactcccagtagaagcggagggccggaaggacaatctgccggtcggtccggctcttctgggcatcgacagacatcatcaggagcgtcgacgggtcgagcggagcgtcgaggtcgacctcctcctcggcgtcggccgactcggtcgtgcccgactcggcggcgtccttagcgagcgcctcggcagcaagcgccttggcctcgtcgaccttggcgagggcggcagcaagaaacttgcggatgaccgtctcgatcgaggggacgttcgtcgtctgggcgacgttgctgcaagaggaggggaggggtcgtgtgagtctcccgttgcggcgagcgagagtatgagagtatcggcacgcaccgatagacgccgagaccctccttggcgaccttggacttacgcatcgagacgcagagctcgaggaagcggacgatgacgggctcgagggcgctgatgggcgtctggcggaagcgcttcgaggcaaagacctcggcgagcgcctcgagcgcctccttctctttgggcggcgagagcgagaggagctctgcggatgagggaggtgagatgagtcagcttggaagacgatgagactcaatgctcggcccctggctctctctcgggaggagaggagaacaagggcgttggttggagggcaaggacggaccctcagctcgctggaggcgtggcaagggcagggagctcgcggtcagcaccacggcatgatggcgagatgtgcgccgcatggacagaccttgagcgaggtctctggcttcgtgtaaggagccattttgaacgttgcgtagggggggtgaggttgggttgaggagacgacagctgcctgcgctggaaaagtcgccctgcgagcaggcggagcccacacgcgcgcgcacagaccaggccgggcgcggagtcgattgctcgtctaagtctctccgcgcgctcggagatagttgatttattgccggcagcttgcgcgcgcgggctcacgcgcttccggtgacggcggcgctctccgcctcctcctcccctggaccatctgcccttccgaccttcagccctcgccaatctctctacgccctcgccatgtctggacccgctgtcaacgccgccgcccagggtgcgtactcgacggcctcctcgaaccgagtcggaccccgcgagctgatcccggcctcctcctcgcccgccctccctcgaccggtcctgctgtcgtcgtcgcttagtcggaggctccaagttccagcagttcctcaaccacccggccggttcgtcttgctggctctgatcctgttcttagaccggcgagctgatcatcgagtcacacttgtgctccgcaggtcctaagtctatccttctactcagagctctcgcaccgcggagcttccctctccgtccgccgccctcggcctgctgaccagcccgaccccttctcgcaggaccatcttcttctgggcgccgctcgccaagtggtcgctcgtctttgccggcctcaaggacatcaaccggccggtcgagaaggtttcggtcaacgccaacctcggtgcgtgcctcgcctctccttggatcggagcttgcgcgtcccgaccgtcgtcgacgacgggtcgccgggttgcgcctgctgtccaggttgctgaccgtggcaccttatcggtctccccttcagccctcatggcgaccggcttcatctgggtccgctactcgatggtcatcaccccgatcaactactcgctcgctgccgtgcgtcctccctctctagcgttcagatgccccccggaacgagccgtcctctactcgtccgctctcgcgctgacaatcattccttctcgctccgcccgtcctccctctgccccttctcgcgctctaggtcaacttctttgtcggctcgaccggcgcctaccagctctaccgcgtatgggagtacgtctgactgcacccttccgactggcgagggcggggggagacgggaggggagctcccgttccctttgctgacctaaatcacccctccctccctcaggccgacacgtgagctcctgtgcggcgaatatagcaccactctcagctcgctaatccgatcttgccctctcgacagcaccatcggtcgcatcaagctctccgagtacatcaaggacagctgtgcgtctgccccgatctggctcggccgctctgagcgctgagactccgtcgctgctgctgctccgatcactgatgcctcttcatcgtgctctctcctttgctcaggggccatcctcttctcgcaccctggtgagccgccctccaggcgatccgccggcgacaggagcacgatgaggcagcgagctgatgagatcggggtccccgacacgtccctcagatgacttcacaccggtaagcaggtctcgctcgatgcgctgatcgacgcgctcgctgaccgctttgccttgttcctgccgacaggtctgcacgaccgagctcggcgaggttgccaagctcatgcccgagttcgagaagcgtggcgtcaagggtgcgtctcttggtcgcccgtctgatcggcgccactcgccaggctgatgaccgtcgcacctgccgctgccggacagttctcggtctttcggccaacgacatcgagtcgcacgacgcctggaccaaggacattgaggaggtctcgcaggtgtcagtctgcgcctggcgagccattcgaccgcgctcgcttgagaagctgacctgcctcccacgacagctcggtcaagttcccgatcatcggcgacaaggaccgctcggtcgccaccgcctacgacatgcttgacggtacgtcctgctgattgcttgccttcagctgcggtcgctgacctggtcgcttctcggccgccaacagctctcgacaagaccaacgtcgatgccaagggcctgccttttacgtgcgtgcctgccggtggaagctcctcttgcagaagattcgctgacccaagtcactcttgtcttttccttttctcagcgtccgctccgtcttcgtgatcgaccccagccggtgcgttactctctcgtatccggtcgccacacaaacgtggcttccctgacttgcatcgcctcctccttccaggatcatccggcttctcatctcgtacccggcctcgaccggccggcagttcgatgagatccttcgtggtgagtagcgtgtcctgcgcccgccggtcagcccgtccgttctgctgacaatctttctcctgtccctcatcagtcgtcgactctctgcaggtcggagacaagcaccgcgtcacgacgccggccaactggaagcttggcgaccgcctgattgtccacccctcggtccagggcgacgacgtcgagaagctcttccccggccacgaggtcagtctgcgccctggcgagatccgggtctcgcgagctaatccgacctttctctatcgctcctacaggtcgtcaagccctacctgcgcttcacgagcgacgagcaggccaagagcatcgccgccgagcacatcaagtagagcacggcgccctgtcgcccagctttccctgtgctatggctcacgttgtagtctccccgttcctcgttgtgatcccatgcacgctcccctatctgcgcacgtcccggcgtcagtctgctggaaggcgagcagtcagtaagtgaggccgctcgcatgtgcccctgagaggcgcgtcggtcgactgcgcgcgcgacagcctctccgtctcctgtccttcgcgacgggcgctcgaccgacgaccaccttcctctcaaacgtcaatcaagccctgcacccttgaaagccaggacgaacttcagcgtgctcgacatgagttcctgtatgtcctgaagtagagatggctcgccaaggcgatcgccagcggtcgagacgcgcccctgaccctccctgtccctccggcatgccttctttccctgctagcccagcagccaaccgtccagcagatagcgatccgagcgccctacgttatccgtacgtcacaggcagcctaggaagatgactgatcaatgcgctgacagccatcaccgcccgactgctattccccaccggcagagtactctcgggccgacctccttcgcctcgagcgcttcgccgcctacccctttgccgaatacattctgccgccagccatttgtgcgcctaactggcggtccaagcctgccttctcgcagggagaggacacggttgggccggcagctccctcgttgccgacgacagaccgtgctatgccggcaggacagcccggatggccggcccctgtcggcggcccccgccgggttcccggccgaccagcgacagactcatctggccctacgatggtcgaggtccaggtcggtgttgacgtcaaacgccgtgtgtctggccgagactctgctgtcggtgcgacgagcgtcgtttcgtccgcgccgaagtacggtccttgtgctgcattcactgccggcatcgcggctacgatgcggccgccgtcgctctcctctccagtcccgctgcatgcggacgaacagcctgctcggactacagcgcaaccatctctttccgagttgaccgccgcggaggaggagtcgacgcctgctgcagtcgccggcagcaagaacggtctctcgcccactcgtcgcctcatccacggcgctctcggcctcccgcgctctcgcaaggagcgggcgccagtcgtcgaggtcgttgcggtgtcgccttcgacgcctgtcgccgagaagacgaggatggaggcagtaccgctcctgacgccggacgactcgcccgagacgagccgccggtcatcgggtggccggggtggcggccgtcgctcggatcccaaggcggtaccgatcgtccgagaggtgccggcagtcgaggtctgtcggctttcagtcagagagtttcagcttggagcgggcgaatcgcgctgactgccactttgctctcgcagcgccacctgaccgaagacgacctcgacgccaagattagacggatccggggggagaaccgcaagcttgaggagcagcagtcggtgcgtgttgaccttgacccgcgtgcgcattgaccggcattgacctcggcatgtccctatcccgtctgcagaaggtcgaccaggatgtcctcgaccactcgccgaccaagtcgggcttcgttcccgacgcgcaggtgagtctctcgagctctctaccccggcaaggatcagcagcctgactcgaggccgcccaccacctctcgcagatctcatttgagcaggagcgcgagcgcaaccggcagcgcaagctgcagtcagccggcgagcgcgagtgggaccagaactcagggtcagcgatcattgccggctttcgacctgccgtcttcttctgacaacgaacgcccgcctcttcacagtcctccgtcgccgtcgttccgcccctccgctggccgcgggcgcttgtctgctctggtcctgcagcgcacagagcctgcgacgccgagccgcgcggtcgcgagcggcgtcgaagcctcgggtccagacctagccagtcccttgacgccagacggtcgcaagccgactctcaagagccgagcggcgtcagcgagggcggcgccggctgaccacgggagtgacggtcggtcagtctcgcgcaagggctccggaggaagcacgtaggtcggcggtcagcgctgaggcggctgctctagccgtgtacagccgccagcccagtcactgtagcatcagcaggtctcctccctagtttccgctcctccttagccgacggcatcgacgtccaatccttctcatgaccccctttgacgaccgttcccgcgcggccgttccgctgaggagccggccgatccgagcagtcgtacaacatggagagcacctcggtctggcgactctcgtcagcgcatcgcgttccggatgcccgtctggatgtaggcccggaccgacttgagtgctagcgaggcaaagaaggtgacgacggcgacgacaaacggctgggtgacctggtgacggcgaggatcgagatccatgggtcagcatcgactcatctcgggctcggcctgccctcagctcaatgcctcccctccctctgcagagcagcacgacgcacctgagccttgagcgcgagccggaagatgccgcgccaatcgatgtcgagcgtctcagcgccccagtcgaacgccttcaaccgagacgtctcggtgtcctcggccgcgctcggctcgccctctgcccgcgggctgaggtactgccgtatgctcttgagaaaggcctacaggtcgagcagccgtaaagctcgggttagccgggcggtcgggacggagagggacggcgagggcgcacctgctcgggccggaagtcagggatcatctcgagcgggaggtcgagcggcggcgggccggctggcatacggtgccgaggaaagtgcaagttcgggtagacggtgcgcgagatcttgtccgacatggcgcaggactgaaacaaaagctgtcgagggagggcaggaaggaaggagagtgcaggtggtggtcaagggcaggcgagccgcatgacgacgacctcgacctcctccctgctgacggtcatccttgctacctcttgccctatcgccctccgcctttcccacctctcgcatcctccagcagctgtcatgtctgttgtctgtgctcgtcagggctgcggctcgacgttcgcacccgaagcgaacgctgaggcctcgtgctcgttccaccccggagctcctgtgcgtccggcggctcccagacggtactgtccattttcccggctaacggcctcagctcgtccccttccaggactttcacgaaggtctcaagggctggtcttgctgcaaggacatcaacaagcccgtcatggagtttgaccaatttatgcagattccggtgcgtgaacgacgaggtcgagctgctccccttgctctcgctccggggcgctgaccgcgcatgctttcgcacacgacctggttcggttgatcagggctgtaccaagtcgacccacctcgcgaaggaggacaaaccaaaagccgcgtccaagccgactgctcctgctccttcggctgccgccccttcgtccgtctcgaagtcgggcgtcgaaacgtacggcgcgccggcacctgcgctgccagcagcctcgacaaccctggcagccgccaatacggccgtcgccgcttcggcctcggccgcccctcctaccccggcctttgtcgaggaggtcgacgacgaggctgcgccgctgccctcgggcggtgcatgcaagcggacgtcgtgcaagtatcggctcgacgccgccgagccggccgcccgcgaccagcagccagactgtctctaccacccgggcgcgcccatcttccgcgagggatcaaagggatacacgtgctgcaagcgccgggtcctcgactttgacgactttctcaagatggagggctgccggacggccgactcaggccacctctttgtcggccagaagaaggaggtacgtcgtcgcatccgtacgcgatgaatggccctgccgcctgctaatccccattaccccttctctcgctgccatagtcgtcggccaaggaggtcgtcgccgctcgtatcgaccactatcagacgccggccctgattcacatgtcggtcttcgcaaagaaggtcgacgccgcgagctcgtccattaccttcacccgcgacagcgtgcgtcccggtgttgctcctcctcatacgtacagagcagagcaagctgactctccaccttctcacttgcttcgcaggtcatcctcgacctcaatttgccgacgtctaaggtcgagcggaccgtcaacctctacgcgccgatcgacccggcctcgtcgagcttcaaggtgctcggcaccaaggtcgaccttacgcttgtcaaggagaacggcgccagctggcccgtcctcgagcggctggcggacggcgttgagctgcccaagggctatgcgctgacctttgcccctcagcggcactgatagatgctcgcctccaatgccctcctcttcgagagttccaaggtaggcattgtcattagaacgctcggatcgccaggccctttgctccattctcgacgcggaccgcgccgaaaccttgtgcccgccaagcgcgcgcgaccgagccaggcacgaggactgccccgcgctggcgcttgagcgcggcagcgcgtcgcggggaggggtgcggccgagagacgatgacgagctgaagcggcgaagcgggcagcttatcggcactatcagactgtcgggcggacaagagaggcggctggcgggatgcctggatcgagggcgggatgcggatcgtgagggggctgcaatggcaggttgggcagggcagtcggtcagtaggtgtccttggcgagtaaaggcgcggcctactcacatccgattgggcttgacctttcggaccccaagagaagtgacaagcgatccatgatccgcagatgagccgaccgaagacgccgcagaagagatggtcgagtcgcagcaggcgggcgagacggagcgggcgggaggcgccggtcggaaccgactctgtaggacaggcaggcaaaggctgccgttcctctgtgtcgccggagcaatgcgtctcacgtcagctcgttgacgaatgttgggtccgctcctgcttggggacgcacgatggagccgaccgagttggtgggcgagacgagcacatcgcgcacgcccgggagcttgccgaagaccgagagactagcaaactgcccgtccattgagtcttcgtcatccgaagcgctggcgaactgaggcgaggcgggaatagggtgcagttggagttgaatcatggcgggaagctaagtaggtggaaaggatgggacgaccggcgcttaaaaggagagcgacgggggtggctggcgtcaaggaaggaaagagaagagagaagagggcgcgaggagggaagagccggcgtcttgtcgagctcgattcttatatagcgagacgctcttagctcgtcctgccagctccgtttgtgcggcggcgtcgacgagcagagcgacagaggacaaagcggctcccggctttgtcgtcgaacaggatgccggtcgttcccaaggtggccgtcggtccgccccttgttctccggctcttgagtagcgttttacaagtcagaccaacagaggccggcagccagatcaaatgcccgggctcgtcgacgtcgagccttattcttcaatcgtcgagcggcgaaaggaaaaaagggggggtctttcgtttcagcccgccgctcgcatctgcgagttcaatcgtctctgacgttcgtctgcgcccgcgggctcgattcgccctggcctggcctccctccctccctaacccacaacttcgccgccttatcatcctcctcaggtacgtccatttgcccttccgccctcgtactctgtcgtcggctggtaggtagagggagccgagttcgccgtcggacgcgacgatggcacgggtcgaaggccgctgcatcgggtcggcaagagggctgtcgtcggcgtccccgctcggaggccaaaggagcctgcctggcctgccattccagcctacacacgccgccgacctcgtccttgacgccgtcgtagggcctcatcgatgcctgttgccgtggtcttcactcggaccggatggcttgctcgaggagggtcgtttacaaggcgagcgtgggctgacctcctccggcccgatcacctccgttgtctctccgacacagctctctcttctcgctctccctcgcccaagatgcccatcaccgcccactccaacctctcgctctttgcgatcccgacggcctacgtcatcgccttcctgccccagtaaatgccgtcctctgtctgcttatccgacgtgagctgttggctgaccggcggcgctcgacctcttccgctcatttcagcaccatcaagctcgggtagtgcgtcttcttggctctcagatctaggctcgcgtgacccctgctgatcgcctctaccgctccagcctcgccgcgaacggcttcaagttctcgaacctgaacccgcgcaagccgatcgtctcgaccgaggacgccgacgcccgcaaggctgccgtacgtctccaaccgacaacggatcgggcttcactcgcggtgctgaccagatatcttgctcacaggtcgccaagcaggctgaccgcctcagctcgacccacgtcaacggtcttgagatcttccccgtcttcgccgccgccatcgtacgccgtcgcccgttccgtcatgcaccgctgccgcagtcaactgaccctccgatccgatcccaacgttgcctcgcagatcgtcggaaactttgctcgcctccccgccaagacgctcaacatcgtctccggcctcttcctcagctcgcgcctcgccttcagcgccttctacttctaccaagagaccgagggcatggcctgggcccgctcgggcgccttcttcaccggcctcggcgcgagcctctacgtcctcttctcgagcgcgtccaaggtgcggccggcctccgtcttcttctagccacgcccacgagctgacaaccgccctttcctcgacccccaggtcttcaagctcaccgcctactagacgtcagacctgctcgcgctcgctcctgttccctcctcgagatcccgccttctgtccgccctgaccgtcacgatcgcatgaccgcttcgctaagccgcgcagaagatcgttgataaagggttgtggaggaccaagatatggggggctgtagtagaagccagagaagagggggaacggctctgctacgaaccgatccgcgcctactggacctggacgtactcgcccgtccagaggtagcggctgccggcgagatagagccagcggaaccacgtcatctggctcttgtgctcgcgcatcgcccggacggcctgccaccaaccgcgatagttggtcgaaatcttgacgtgctggccctctgggaagaggcccgggatcatcgtaaagggcgggaggacgctcaggaacgagacgaacttggtgagcggggcgtgcgtctggagcgagaagacgcggaggggcccggtcgacgactcgtccttcgaggcaaaggcgcgaagcgctggcagcgacttggcgatcgccgcgtggttcgggtgcagcgagacgccgcgctcgtcaaaggtgatgacctgtgagaggcggtaggtctcggtcagcggggcggcctgagaggagaccggccgtcactacatgagcgcacgttctggatgttgcgcgactcgacaatgtgcttgatggtcgtggcgacgacgtctgggttccactcggcgttgatgtcgtcctggagctcgctgcaaacggccggagcaagggtaaagttgtctcagtgcgagcgcgtccgggttaaggtgtcgagagggcacgcacgggtggccaaagaggatgatgttgctctgcgggacgccgagggtgttgtacgccttgacaagctcgccagcgcgctgcgagccgaggccgtcggcgttgccttggaagcggaggagcaaggacgcgtcgtaggctcagcccgactgccatccgactacccggcggacaacagcgctccaggctgctcgtccaagctgcgacgcaccgttactgaggcagagagcccagagctcgccctttggctgggctgtcagtgcctgaatggcggtcgagaagaacatgacctcgtcgtccggatgagcggtgacgagcagggtgttgccctcggggaacgggttgccgttcgggccaggcatcatcaggaccgacgagatcatgagcgggaggatgttcatcacgaggaggaggagggccgacatggcaggcaagagtctgctggcgacgaggacgaggttgaggcgagatgatggtcggagcgagatcaacagcgcaaggggggacgcccggggcaaggcaaggaggtcgaggaacgcaagtgcaaagaaggtgagctcgagccggagggagagaagccgactctgctcttcatccatccgacctcgactcagccagcacgcccccgcctgtcttcgccgtcctgcaagatgaacgaggtcagtcgggtgtccggctgtcgtctcgattttggtatctcggcgccgtcgctaaccgccagctgctctactcgctcctcttctgcccttcagcccgaggtcgccttcgaaccttacctgccgtccttcaacctcgcgccagcggccttcccatggtcggcggccaaggtcgcagatgtcgccgaggcccggaaggtgaccggccggctcttctttgacgagctgcttagtatggcaagcgtcggttggtcctcctcctcgcgatgttgacgtgcgcggtcagagcctggagcgatgctgatcgcccgccctgcttgcgaaatcgccacgccagatgcccagctgtacccgcccaaggatacgctcacgctccggcacctgctcaatgcgatccagtcgtgcgactttgaccggctcaagaaggactgcctcgtcttctacctcctcctcgactatgccggccagcagcaggcggcaaccttccgggacgagcgcgccctaccggctcgctttgcccgcctaaccgagggctactggcttctcgacggccggcgttacgaggtgcgactgactgggtttccccttcgtcttgctgtgccaccgtctgacacctgctcgctctcgcaggacgccgtcaagtacctcacgcagccctccctgacgcccgacttcgtgcccaagatcctccggacgctctcgctccatccgagccctctgacggctgcccggctcgtcaaccgcttccttagtctcgcgacgcccgagttgacgaccgacggcgaggtcgacatcaagctcgacgctctcgcccgcatcaactttcgcgaggcctgggaatctgtcgagagcctcagcgagagcgagcgcaagcaggagctcgtcaagcgagtcatcgtcgcgacacttgctcgtgggtcttgctcaacgtcacctttgcgtcatgctcctgctgaccatccccccgcctccctcctgcagccaagcctgtgccggcccaccttcagctcctgctcgccttccccttctcagccggatccgagcagacgctgcacgctctctgccttcagccgccttcgtcgctcaacaaggcgtcgatcaaggtactgcacgaccttgcccatacgcgcctcattgcccagggccgcctgctcgacgcgattcggctcgaccgctcgattggcagcggacgcgagggcgatcagcggcgcgagacgattgagcgcctcgtccgaatcgtgcccgaggtccagcgacggatcctcgaggtcgagatgagcggcggcgcggacaaggcaaccgtcgtcaacaacggcggcgccgcgccgaacgagtacccgccagcaccaacgccagccgcgacgctcgtcgcgcccattccggtccccgtggcgttccagcaccagcagaacctgccgctgtcagcctcgcaggtgcttcggacctcgtcgcctcagctctcggttcaccgtgcgatcctctcgccagcggcagcggccccgccgtcgcccgcgagggacggcgcagctcagcaggcaaagcggccgttcgcctttccggccgccttgccgggtccttcctcgcccgcacggtcgcccttcggcgccaaagccgacattccggcgtcgctgtttggcggccggaccccgttcgcctcttcgtcggcggcggcgacgagccctagcttgccagcgcactacctcccccaacgccagacgatagatccgtcgcccgccccctcaccagctcgggttcagcccgtcgcagcctccgccagtccctttgcgcaggcagcgaagcaggcctcacaggcggcctaccggtcgagcctcatgagccgcgaccagcgcgcacggcaggaatcgccccgctaccagtcgccggcgattcatcgctcgtcatcctacgcccgcgatgacatggccgacgatgacgacgagatgctcgtcgtcgagagcccgccccctgcggcggccaagaagcagcgcagcaccggccggcagtcgaaggagaaggcggtcgataagcctccgtcgaaggccagtcgctccagccggcgctcagccgctgccgtccccgagcagcaagccgaggaggaggtcgaacaggtccacgctgaggcagacgaggcagacgacactctgcccggcgctttccctgaacccgccggttctgcggacaagacgtcgacgacgcgcaaaaaggcctctacgcgcatcgcagccgggccgaaggcgaccaagacgccccccgctgctaagtcggcatccggtcgcggccggcgtgcgcccagcattcccggctcatttacgacgggcgccacctcggacgagtcggatggcgagagggcggacgagcttacgctcgaggacctcgcccctccgcccgctgccgggtcctcgcgccgcaagccgtcgtcgcgcaacgccccgccggcggcctcgtcgtctggctatggcctgcgtaacgcccacgtccgcacgcggtcgatgagcgtcgcctcggacgatgacgacgacgacgagctcgcctccgagggcaagacgccgccgccgtcactccggcgccggacactccggagcagcgtcaccgtcagccccgaggccgtccgccgggctccctcgggcaagacgaccgccggctcgaccaagccgcgcgggacgggcagcaagctcaaagaaagctcgaccgctgccccgacgcgacggagcacgcgccgaacgaacgcaggcgatgagtaggcgcggcgtcatcggccgacatcagcagacgatctcggctgacggtgccaggtcaagcgtcagtcacttcattcgcagacggtcgggtggtcgctgggtggtgccgagcatccagcggtagatcgcaccatcaagggcgactcagccagcagccgactcatcatccttccctatcgcatgcgtcagtcactgtctgtcgatttctctcctttgcccgaccggtcgggctggcgggcagcaggatcgtcgggcgggctgccgcacaaactccacagaccgtgcagcaggaggcggcggcggcggcggcggcggcggccatggggtttcgcgggcgcgctcgcacgaggaagccgctcagtccgaagcagcgggcgtcgtcatccgcacgagggtggcggcagttgccgaccgacgcctcaaggtttctcaaactgaagccggccagaaaaaatatagaccgatgctgtgggcagacggcctcgcacggccgacgaaagggcagcggcggcgcacgcacacttcggagggagcgaggcagcgtgctgcagcgtgcgctgctgggtgacgagacggcttagcagagccgccgggttcacgacactaggcgcacgacgagatggtccgcagcggccagagacacgctggacctggtcagatgctgtagccagctcgtccttcatgttcgtcgtgcaatgtaggccattccggtcggacgaggtccggtcgaagctgctggcgtcatgctgcgcccgtcgactcgacgccaggggacgcagcagagccggccggacgaccgcccgacaccgacctcgacctcgatctcgaccagcctctccagaccgggataggaatcgctcgctgcccatatccctgcgcagcccttcctagcgcaacagaccagcaaacgtccgatctctcgtcgcccgcggtcgtcttcttctgccggtcaagctaccgggccgccgcctcctcctcccttcatcgcttgcctcgcttcgggctcgagcaacatgaactcgtcgacccgagcacccggcccggccaacatcgccctcccgccatctggcttcgagtcgtctgcgctcgacacgccagactcgaccccaggcacgtcgccgctacccggccggacccagcagcagcagcagcagcagcagtcggcgcccggcccgcatcggatcagcttctctcaagccgccttgaccggccgacgaggccaccggccgtcgggcgcgagcagcaagcgcttcacggccgggggagctggtcgacggatgagcgctgctagccgggcgaggagtctcatcgatggcggcgaaggcgagctgactgaggaggagctcaagccagtcgtcccgagcctcttccacgccggcctgatccgcaaggagcctgacgcaacgccgctgccgctgtgcgttcgcccccccggcagtcattgcttgagacctgctggctaatgctgactttctgtcgactgcgccaggctgcccatgctcgtcctcggcatcgccatgatgggcgagttcctctcgggtgagtgcgaggaggtcgaatgcagagggaatcgctcgctgagcctcgtctggtgctcgcacagcaaacgtctcggccccgttcctcctggcgatggtacgctcgtttgggaccgatccagttggcgtcggcacgtcggccggctacatagtctccgccttcttcctgacgcaggtgggtgctcaacccagcttgaaactcggcatgaacctctctcgcttctgacctgctgacgctgacactctcgtccacagttcttcacctcgcttctttgggccagcctcgctgaccagtacggccggcgagcagttctcttcgccactctggtcggaagcggtctcagtgcggcctcgctccagctccttgtgcctgtcttttgagcaccccgactgaccacatatacccctcccgcagcggtcattgtctttggcacgtcaaggagtctccccgaggcgattgccgtccggctcgcgcagggcgtcttctcgggcgggatcggcgttgtccggagcggtatcaaggatgtcaccgactcgacgaacgaggccaaggcctgtgagtgttgactgcggtcacagcatgagggccggcaaggctgacctctctcccgcctaccagatgccctgctcggcttcgtctggggtttcggcggagtgattggaccggtcatcggtggtctcgccgagtcgccggccagaaactaccccgattcgtacgtcggccagctgccgctcttcaagtcgtacccgtacctcttcccgtgcctgctcgcgtcggccatcctctttaccggcgccttcctctccctctttctcaatcgggacggcggctcccgctttggagccatcgcccttccgatcgagaaggacgacacgtcggccgaaggaccgacgacgtctggcctgctcgaggctgcagtctcgccggcgccagagcccgagtcgggtccggcggccgtgccgaagcagctcgccaagcgtctctctggctactttgccgagcgcgtcatgggcatccaggccggctcgacccgcgcctccttcgcggccgaagcgtcgagcgtcccgcttgctgaagcgacgccgaagcgccggaccgtctcgtcggcctacggctacagctccggccggtcaacgaatggccgctaccgcccgagctttagcagcgacgcgaccgtccgcatggaacgcggcgacgccaacgacgagccggttcaggaggagcacctcggaacaggcctgctcggcaccctaacggagcgcctgctgctcgctaacgaagcagcttcgggcaacacgcttggagacctctggcttagccaggccctcgctcaggaccaagagtcggtttttgaatcagaggaggacgaggatgaggtccgtaacctcgacgacttttccgacgaggacgccgggccgtcagcctctccttcggccaccgccagcccttcaacgacccgactcggcccacgcgatgcgattcgctcgcccggccaaggcccctcgccactgtcgcctaacgcgacgcgccggcacgtctcgcgctctcagctcggcgtcgagccatccggccacttccccggcggccaccggctctcgacgtcgggcaactatagcagccgacgggtctcgaccgcctcggttcggccgccttcgctctttgcccatacgggcctgcagtcgccgcatcagacgatgacgtcgccctcggccggcggcggacggcctggcgaggagcaggacccctttgcagcaactatcgcggccgagggcctcgcttccatcaccgagggcacgccgacgcgcttcagcggctccggccacacggactcatctccggcaccggccacagccaaggagccgagcgtgctgtggaagctgccgctgttcctcatctttcagtactttctcctcgcccttcacgacacgatcaacggccaggtgcggcccctccaacctgtctcgcctattggtgcatgatccctgacacgagtgtcccctgccagctcttcctctcgatccttaacagccagtacgaggtcggcggcctcggcctgtcgccgtcgcacttctcgaccctcatcgccgtcatgtgcggcttccaggttgcctaccagtttatcgcctacccaaagctcggcccgccgctcggcccgctcacccacatccagatgttccggctcggctcggccctctacatcccggcctacctctcgacgcccgtcctccgggcgtttgcgagcgctggcaacgacggcagcccaatcttgatggctgcgctcacgctcaacatggcctgccgctacgccggcggcaccttctgctacacgtccatcatgattctcacgaacgcaatgaggtaaggtcgccctccctgcaccctctggcttgcagctgaggctgacgcctgttccgtgctatcccttacccagccctcccgaggtcgtcaacctcgccaacggtctcgcccagtcgaccgtctctgccgcccgcgttctgggcccgcttatgggcggcgtcctctggtccgtctccgaggtcaagggcaacacggcgctcggctttgagattgtcgcgatgtaaggagctgccggccatgccagcttccttcgaggcagagcatgcgaagctgacctctaccgccttgtgttccagtgcttgcgccgtcgccctctgctcgtccttccttctgcgctgaggccgacccacacaccgccgccggcctcggttcgactcgactctccccgcacatgaaccctcttgctcagcaacatcccttgacgcccaatctcactcatcgaccccgctctctgcctctatacacctaatctcgccaacaaacgctgccctggatcacacaatctgcttcacgcacgcacgcatgcccgtcccctaacaaacctcacacgcctccctcgggcgaacgtgtgacgatccttcgtctggccgttgagggcggactttgtcggtcggtctcctacggctcgtgacgagtccagaccagggcgcccgacggcctcagccagcaggtgatgcggctgacgggaagcgctcatcttaccccaactgacctttggcacccgagttgcccgtcggcctgcgtcggtcgggcgcttctggaaggaggggtgcaagggtccgagatggcaagcttctgcggggtgagcgtgcgtcgagcgccacggactgctgtcggccgccgaggactgtcgagcaagcaaagcaggcaagcaggcacgcaaacgtcaaggaccgaagcacggcacacaagtccagaggggatgcttggtggtggtgcaggagggggggctcgagggctggctggcggccgactttgcgacccgggcggccgagcggcacggctcggagctgctgctcgttcctggccggcctgcaggcgaaaaagaggacggctggtcgttcagcgcgagcggcaaccttgtgcgtcctctccgcctgtttgctgctccttcttccgactcgatcgaagctgacctcgcgcccttcccccgctcacgccgctccccaggactcggctctccgaccggcgacgctcgccacggccaaggactcgcccgtcggccttttcatcccgagcgagctcgtcgacgaggtcttcttcagccagcgcaggaccaatgccgagctgaacgatggccggttagcaattgcaatcctctaccacaagtcgagcgccctgctcaggtgcgtcggcctcatcttgccctcttcacgttgctctgggaggcgcctcggctgaccctcacatcgcgctctcgtcaactgcagggtaaagtgctcaggcgactcgctcaccctgccccaaatacgctgcctgagctgtcttctcaccctgattgccccccgacctctcaccctccttgtcaaccatctcatgagtctgctcgttgctttggccgctgattgcttgataggacggggccggacgagttttcatttcgcgcttcatttgcctttgtcgcgtccaaggcgaacgccctgctgaatctccgcaccagtcgttggttccaaaaagctccaggggatgacccagccgatcaaggtctagtgacggatcattcaatatccagcgactgaaggaaaatgttccagcgcgcaaaatgatccagcgccagatctttcccggcgctgcgcatttcccacagtgcgagaggcctgagagtcagcgacgaggcaggcgacattgtatcgccaacagcctgtcaggagaagccctggccgccgttgcgcaattcgggggcgaagccaaagttcttgagcgcgaacgagaagaacgcggcatccggcaggtcggctgaggtctggtgcgttgtctgcgacggcgagtcttgcgagagaagatacgccgcgcctaattgaggctgaagtccatgtggcgccggcgcagagagaggcgcttgaagtgcggccgatagtcgcttgagccgcaggatatcgtcgatccagccgacaacgagcggctggccaggcttcctccagaggatagcggcccggcactgattcaagccttggagaagcgctgcctcgtcgacgacgaggccagcctgcttggcaccgaggagcgcgagaccgagcgtcgcggcggcgttcatgagcgcggcggcgaggacggccgcggtcggcccatttcggcgcatgagcgtctggaagacgtacaccgtccggaaggcggcactgacggccgcgtcgaacgatgaaggcgaaagcggcgggccagacggctgacctcgggtcggaaggctcggtcggtggatgagcagcaggatctgctcgatctgcagacgaatctgtgaaagagcgtgtcagcgctgatcagcaggccgtctcctgcgttgtcagctgagattctgaccatagttgacgcctggaagacccgcgagtgcatcgccgcctctggatcccagcgcagcgagtctggaatctgctgctgcagctcgtccgtctcagcttgcagcgccttcatctgctgcacgagccagacgcggccctttaagggactttcgatgctgtactgaggtcgcagacgcaaaatcgccagtcagctcgagccgtcgagaggacgagaccttaggcttgggcgcaccagtgtatcgaccgtcttccgcaacagcttggccgccgcaatcagcaggcggaaggcaaccgagaactctgacagcgcgccgccgtcctcgccgtcgcccggcaatggcgcgttcacggcactcgtcggcaggtgaaagttacgccccatctgtgtcgtgttgagcgcgtcgaggacaaagagggcccagaaggcacggcggacgtcggcctcatccggttcgttggataggtagcgaccgctccgatgcgctcccatctcctgggcaaagagcatgccctcgccgatgacgttccaggacgcgagcggattgctgctggcaccttgtaggaagccggcagtcaactgggagacgagcccggtcagccctcactcgtctagtagatcgagagtcaaggagtgagccacatacgacgctcatctgcaaatcagccaagttggccggccgcatccggtcgcgaggcgtgcgcatcgcctgatggtaaaacttccagccggcagaggcctcgtcaaacgtcgccgggccgaaagggtcaagcgacatcgagggcgcccaggtccggacgtcttctttgcactcgcgtgcggcgaatgcgaagagcataaggcagaggttggcataggtttggtcggtcaggaagtcgcccgaggcgaagcgtctattgaacgggtaaaaggtcgaatcagcgcttgctcaacggctcggatccggggagtcagcgggaactgacctgcgaaattccgtctctgataggagcggtatgacctggatgtgagatgaggtcaattcacgaaggccaggcaagcatgacgcaaagagatgcccgcaccgagttcatcagctcgaaccaagtgtcgatcagcctgacggccaagtcgagcggcggccaacaattgatgtagcgaagcgcgtcggcgtgctctatcgtctcccagggctgccgttctccaaaaggccgtttcagaaaggcttcgccgtcgctgctcgacgggccgttatctgttgaggtaggccgttaggaacgtcaggtccggcgagaagggctgccgcgcagatctctcttgcgcacctgctgtcgcctgctgaaccatgcgctgcgtttcgatgatgacggcaaaggtgcttgatgagcccatgtacgccgagcctctgccgcccgtaccgatgtttgacccatcgacgtcgccgtgctgcgcgggcggcactaggcccggagcagacggctctggcgtctcgttgttcgagctgcccagcagctgcttcgaccgacatccagagaggagaagcagaggccggtcagtgcgtgctggcctagattcagggaggaggctgagggtcagacgcaccttcgacgccttggccgaccgctctgacgtgtcgaccgtcctgcgccgcttcgacgtcgcaatatattcgcaggcgatgccctgcctctcgcacagcgagcagagcctagacgccccccgcgacgggccatcacacttcatcttgcggtaccggcagtagtcgcaggctcgagagcgccgcttcttgacgggtagtgctaaggtcgacgaggtcgatgggccgccgccgcctgcgcctccgccgcggccggctgagccgccgtcctcgtccgagccgctgtcgacggccgatctctggcctgctggtgaccggcggctgcttgctggcggagagcaggacgctagaggtggctgcgacatcgttgggggtcagggtcggagggcaggctgctgccggtcgccatgctcccacccgctggtcggtctgagcgcagtcggcttcagtagacgggccctccggcgagtcgcatcctacgacgaggcatgtctccgagctggcaatcagcgtctacagcgggtgtctctgctgctctggcagctgcctcgtgcagtgacatcaggcgactctggcgtcagcgtcggtcgctaccgcccaaccggccttgcggccaagggacgcccgagcgtcggccgccggccggccaagtcgacccgtccgcctcgcttgccgcaacgtcaacagcctgtcaaccgtcgtcccatttacctcgagttctgccttgcatgggcccttctctccgccatcaagtcgtccctgcgctcgctcctgcatgtcggccatcaacgacacgacgaccggccagcctgtcgctgacgacagcagcagcctgcttgccccgccaagtcacgagctccggctcgtgagcacctcgacgacggccatctcggtcgcatccgtccgcgagctcaagccaaagcgcgagagggactggcgcgaagccttctcgccgtcggtggatgaggagctcgtcgagagtgcgtccgatgacggtcgtgctcctcttgtcgtgccaaggccgcgcagctgacctctctcgacgctgtctttccttggcctcctcgtctttcctcatcgctctttcaaccggctggatcttccgctgctgctactgctgctgctgctttgatctactctcgcttatcgtctcgctcgactctgctccacctgatcgctcctttgtctcctcagcccacggctgcgcgctcgcgcgagagatcctcatccacggccggatctacgtctcggccacccgggtctgcttcaagagcaacatcctcggctacaagacgctgctcgacttcccgctcaactcggtcgtcgcgatcgggccgaggatgacggcgctcgtcattccaaactcgctcgagctcgtctgccagagcggcgacgtcgtgcgtcccaactcgtccctgggtttcgccgagcggccggcactgacgcatctgctgacctgctaaactcgcctatccagtaccagttctgcacgctgaacgatcgcgacggaacgctcgacatcctactcgcgctctggcgggtccaagcgcctgaggccttcgctgctttcgccggccgcaagtcggccgaggaggctatcgagcttcgtgcgcgagccacgtccgtctcgtcggtcctgtcaaagccgtcgtcggtcggcggcttgtctgcgcccgggatcgaaggcgttcttcgaccggccgagcccgatggcgtccagcggtcgacgcaggctgcggctgcgctgcctgccttgccgccgtcgacgacagcggtcgaccggcaagacgagaagacgccgctcacgacacccgggatgaagaaggccggcgactcagctaagatcgacaagagcgccgacctgccgctcgtcgaccagctgctacgggactcgtcggccttggcgctcgcgacgctcgccggcctcctcctgcttaccaacgcctacctcctcttcacctgaagacggctcggcgacgactgaatccactcgaccgtcgtacgggacgatcctcagcgttccggcccggctcggtcgatctagtgcgtcggtcgagcgcttgtgaggcagccctgtccgccggcgcggcagcagcggccgcccccggcgacgacaggcatgaggccgatggcgtcgctctcattgcgtcaccttagagacggcggatactctcaactcgcgtagcaactcgcactggtggcgagaaaagtggcaagggaggcggtgccgccggaggaccagaggatgagccctgctgaacccccttttgtctgcaatgactcttcgcaacgccatgagcaggtgattggcagacggacgcgcatgtattgtccggcggcaccggctgaggcaagatgacagtcggcccgaggtgctaaaggaaggtctggtctggctgggtatgagaagcatgcggagtcggcggcccgccgaccagaggagagtcgtcgaagccgagaccaaagccaaaggcgtcgagcgagaagttggtctgcaaaagcgacgcatagtcgaacgtctccaatgggccgtattggccgagggtcggccacggctggtcgaccgggccaggagccgatccgctggctgtcgacgtctgcgccggcgcggccggacgcggcggatcgtcaggggctgcccttttccgatcgagggccgaccagatccagccgacggcaggcttcgaggccgcggcgtgctcgtcgccggccatcatgccgtgccagcagtcctggagactcttgagcagggcaggctcatcgacgacaaggcctgcgagctgccagccgaaaatcgccgtgcccaaggtcgttgccgcgtcggacgaggcgaggaagaatggccagaattgaggacagccgccgctgtgcttgacgtagtcgaggtggatcatggcagccttctgcgcggccgaaacggcggcgtcaaacgagagggccgagacaagcgcggcctttggcgagcgacaatccgggagcgcaggccgattgatcaacatgagggcagcttggattgcgatgtggacgtcggccgaccgatgcgcgaggctctggtcgctctgcgatggcgcccaggccagcctgcggagaaagccgcatgatgggtcagtgagcagtaactgaaagcccatcgccaggggacggacgactctggcaggctactggcgatggcgtcgatttctgctgtgagggcggccatctgccgcgcgacgaaggagcgactgcgagcggcgctgtcaaggccgtactgcgagcccagacagcggtgggtcgagcgacacaatcagctggtaagttcgcaacctacatcagcaatcaggtgcacctacgagagagctcgcagccgtccgcatgacccgcgcgaccttgatcgtctcgtagaagctcgccaggtcgtcccgaggattggccgtcgcttgctggacaggcagagccgcgtcatacgtcgccggagcgatgtgcggcgaccgaccgctgctgatcgacacctgtatgtcgatgataaagaggcctgcaaaatgcacgtgtcagcgcgtcggtcagacctcgcattgtagggcggcggatcgacgcactccagaagcctcgacggaagaggtcgtcttcgattgcatcgcggccgagtccgccgctgtgagctcatgaagaaaagagtcagccatgctctttcgtcaagccgcagagagtacgcaccggtgagctccaagttcgtacgcgcgcatgacgccttctcccacggccgaccagaccgacatcgggttggacgagtggatcaggaagaggctctgaagctgcagaaggcaagtctcgtcagctgaaggcagacaggatgaccaatcgagacccgatgggcgggacgtacgaccgctacctgtacgtcagagacgtcaggaggagccgtgtgccgcctcggcttccgctgcaactgaaggtagtagacccagccagctgaagacgggccgtgcgtcaacggagcttgcgaatcgagcgcgaaggtcggcgcaaacgtccgagtatcgtcccgccggtggactgcggcaacggcaaaaatcatgaggcaaaccttgtggaagccgcggtcggcctggtagtcgcgccgccggaagcgtttgagaaagtcggcttcgcggaggatcggaaagctgaggttggccgtccgaaagtagtcgccgatcagagccagcgcgaggtcgtcggccggccagaagtcgagcagcccgagctggtcgatgtagtcgtccgtttcgtagaccggctggaagccaaaggtctcgattggccgccgccgattctgttcgtgtggctctggaatacggtgggggaagcccgaagcctcggcaagtccgtacaggttcatgattgaagcgaaggtgctgctctgaagttttgtcagagggcgaagtccacggggcgatcagcttctgctcgagcgtttgacagcccgtgtcaaggcgcaccttgccgagccagaccctgcttggcttgccgactactgggtctaggccgacagatgactctggactatcttccgcaactgcaccgtacgtctgagccgagtgaggtcgaacctcaaggtactcggtcaatcgagagtgcgtgctggcttgctcgccctcgccattgctgccatcagcatcgagcggactggcgccacttccgcgactgccagggcgcgctggagggggtacgacgaggcctggctcgatcttggccgataggcgcggtcggttcttgcgcttgttcgacttggagacgtactgtggaagcgagaaagagccgtcagctgcagaagtagcaatggaccaagacaggcagccgcaccgtgcaagggcgattctggcctgaagagcacggcaaggaaggagagtcaggcggatgctagtgaagacgcggctggcagccgctgcggattcccatgagagggtactgacctcggcagagggtgcacactggagcgtcaaggagcaagtgtcagctttaatgagctccagacagatgcagaggccgccggctatcgacactcgagtcgaaggcgagcgagccggagaggtgaggctgatggcggctgcggagcaaggggcgagagcgcgatggaggacgctgacctcggtcaggcttctcggcaccgtcgcacttggccttcctagagcgacagtgatcgcctgtgatttgcagatcgaagcgtgtcagagagatccacaagagagctgcaaggacgctggaggatcgactgacaggcccgctcgcgacgcttgcgtttggcaacgacggcggcagcagcagcgacggtcgagccctcgacggcgccgtcgtccgagtcgctatcgtccgagcggcctgggctgccgacactggtccggcgagagggtccagcttccatgcttgctgctctcgtcgtggctactgctggcggaggtcgtcgttgctgacagcctgcccaccgtaccgcacaactggagcaaggttggcctgcgccgcgttcgcccgcccacacggaccgcctattcgacccatcgtcccttcctctggccttcacatcgcttcctgcttatcctgcgcgctcgctgttgacatctgctgtcaccgctcacctcgcgcggatctctggcagcccggcacctcagcgaggctgaagtgctggcttgttgccgcgtctgctgcgggcccgcctgtcagtggccgcccgcccgctcgttggccgcccctccgacgtgctcctgtcggccggccttgctgctctcgcctctgacagcacctcttaaagactgaccggcagagaaggcctgacgctgaccttattcgccttctctcatctcccactcgacctcctactcgcctgatgccgtcctacagcccacgccgcgcctcggcgctcgccctcgccgccgtcgccttctacgccctgccgactgcgcttgtccgtcttgcccatcggctccgctcttgcatccggccgcacgctgatctttaccacctcgctcaggcccaagagtggaccgaggacaactaccagatcacgaatcccagcgggccctactaccggcggccagtgtgcgtcgctgtctgcctctcgctctcgtccgcagcctctcgagctgatcgttgtgacgccttgcagtgccggctacatcccgaccgtcggaccagccatcgttttcaccctgctcttcgcatttctcgcggtcgtctcatggactcgtacgtcctcctccgtctgcaaagctaccttgaccccacctgacacccacccgcccgccttagactacgcccggcggaaggcgctcgtctggctcccgatcggacacacggctatggccgtcggctttgcgctccgcatctacggccacttcacgcccttctcgatccccatctactcggtctcgcaggtgcgaggcgcctctctctcgattgtcgctcggcttcgctgacgcctgacgacctgattttgctcgacagatgctcatcctgctctcgccctgcgcctacctggccgtctggtccgttcctttttctcctctttgaaacactgtctcaccattctccaacggactgtaattaatcccactcctgcctgtgcgctcttcactcgcagttatcagttgctcggcaaaatggcgacctcccttggacccgaagtcgcacgcaactgcctgctcatccgcgtctcgcgcatcacaaagatcttcgtcacgagcgacgtgatcaccttcctcgtacgtccgtgtcccttctgaccgcgcgccggaacgactgccgttaacatcgccttgccctcgccgtctgcagatccaggcctcgggctccggtctgcaggccgtcggcggaagcactgcaagcctcggccataatctcgccatggccggtctgatcatccagatcgtctcgtttggcacctacttcttcgtcctcgtcccgacgttcgccatccggacgtgcgttcacgttgtgtttcccttctcattcagtggccgcgcgcacgtcctgatcgcctctcaaccttcccctccagccgcaagatgttccccgaggcctggcaccggtctgacggcaccttctcgcgctcgcccggctttgtcatccgaagcgtcttcagccgccaggactttgacgcctggaaggtcgtcttctgggccaacatgtttgcctgcgtcggcttgatgatccgctgcgtcttccgagtcgtcgagtactcgcagggtcggtcttcgctctctcctttcttccctaacggtggatctgacgctcatcatttcttatcgtggcaggcttcgacggtgcgattgcgacaaacgaggcctacatctactgcctcgactcgctccccttgttttttggcctcgccatcttctgcatcttctatccgccccgctttctcccgcacgcggccttcatgcagaccggcgagcaccttgagctcggccagcgcgagtccgaagagaagtttggctcgcggtagggcgccggtctcttggcccttcttgcacctccttcttgtagccacccctctgcccaacgaccagtccttcttctctgcctgcgatactcatgactggcccaccacctcgaccggctcggcctcgcgcgataagaaaagccctctgatctgcaccgagatctgtctagtggaaagaaaggaacgtgtgtcgactcccctcctgatgcagcggaaccgtccctggctccggcccgtgcaactgcccgctccgtccgggtcctgcctggcgctctccgctcatgcctcgccgtagaagtgctgggtcggctcgacacgcgtcggctcgccaaaggccatctcgtcctgcaaagacgaagccagaagtcagatgtcagagcgtcagtgcttgaggcgcgaagggaggggcgggtcgcgggcagcggtagggaaggactaacgtgccggcgaatgtccgtctgctcccaggggtactcgacccagtggtcctcgatgtgctcgccggcaaagtacggcgtgccctccgggatgttctccgccttaggcttgagcctgacggacagcgcacgccggagagggagcaagcgtgagcactggtacgcatgccgcgcgtcgagtcgaggcaaagagaacggggaccgacttattgtggacgacaaagatgccaagctgcgtcttgggcgtcaccttgcgctgctcctccgtctgctgcgactcaaggatgtcaatgtccttctggagctcggcgacggcgtacgcaagcgtcttgcggctgacagagggaagggccaaaggcgtcagcgcagctccctgaaacgtcagtcgagagaaaggacagacgtgtcgtcaacctcgtcgacgatgagaatcttcttgccgagcatgccggccgctccagcggcgccgagcgtgctgaagtcgagccattgtgtgcggacgacctcggtgccgacctgctcggccgtcgtcgacggcagcgactcgtacagcgacagaccaatagcctctattggcaagcgtacagagcgaggcttcaggtcctagttcgaatgtcgtcgacaagaagaagcaaaagggctgacgcacggatagggacgttcgacttgcgcgttgagcacttgaggaaggtccgcaggacgcgcgccgggctggaggcgcaggaggctcagccacgagctcattcgtgatgccagaggcgtgtgactcacaagaagccgccgcctccgatggcgatcatgacgtccgggttgaagtcgcgcttgatctcctgggctgcgggagggtcggtttcggcggttcagctcgtgcagcttggcagccggagaacagcgcgtcgacgaaggatggccctcgctcctggagccatttctcgggaatgcgcctcgcctgcgaggtcgaagctactcaccagcgttggcgataagaatatggatgtcgtcgtacgtgactggagcaggtcgggtcggcgtatcaggcgggagctgaagcggtcagtgctaggcgctcgaaggggaggctcgtcagtgggccggacgcaccacggacgtgcccgtcgccgatgtgaccggtaggctgaggagctcccattgctgatgcgaagaggttatagacaagaagaaaaggaggagcggaggagcagcaacaggtaagggactctggcgacagggcaagcagctctcgctcgcgcctggcgcatggcgcccgcggccagaattcacttctgcctccgaccttcactccgggcagcgcgggccgggtcagcgcgggagacgtagtcgtaaaagggggggcataggttgcaaagtggtacaatagggctcgtcaggggcagggagcgtcgtaagagaagaggggagtggagatggtctcgcaagatcagatgctcagccagcggcgcaggacacgcttggcctcggccggcgccggcgtcatattgtggatgaggctgaggttgaaggccgtctcccggataagcgagccgggctgctcggtcaaaaagggctcgtgatcagcctttgaatataatggtcaggcaggggcggactgacctcggcgccggtccggccgtccgtctcggctcgggcgaggatcttattgaagtgcgccttggcgaggtggaagaggcctgaggcgcgaggcgagaggtcagttcagagccagcgagagcagagcgcgggaagacggccgcaccgagccggtgaaagacggtgccaaagttatagtcgacctcgtcgcagtcgggcccgagcaggtggttcgaccggtacttgtcgaggaaggcgaccatctagcagggcgtggaaggcgatcagtggcttgcagcgagagtgaggaagtcaaggacgcttacctgggcgatgcagtgatttcggttgtcgcattggcgctggaacgcccggccgaggtagcagagtgagagctggaagcaaatgagcgggtcccaggggtcaatgatgtgggcgtgcgtgaggtagtctgcgacgagccggggtgcagttcagcctctgctaacgaatcgcttaactcagggccagttttgactcacacatcgcgctctgatagctctttgcgaccatcatcagcgcgccgtaataagtgaagaggaccgggctgggcttggtcggccgcttgatcggctctatcggcatcgtcgaccgcggctggctgcccggggccgggcgcgaggccgcccgttctccgccgtccgagtccgagccgtcatcgccgtcgtcgtcgtcctgcgtggccgccaccgccgccgccgctttctccttgccctttgcctgctgtaggcccgggtgccagcggcccttaatggagttccagaggagcttgccgtcttctggggcggccttccacatgcggagctcacgcaggagcagcttctggaggttgtagctcgagagggcctcgatcgactcgacgccggggctgagcgtgctgacgagcaggtggctcgccgcgttgttgaactgcttcatgatgaagatccgccgggccgagtcgacgagcgcgttcgagtcggttaagcgcatctggcagcctgaggtcggcgcaaaggagaggtcgcggacggtcaacgcagcctcaaaccgtagtaagtgtcgtcggcgatgacgaaccgagcgagacgacccggagagtctccagccgttcgcgcgagcggaagaggttggagtggcaaaggtggtcggcaacctcgaccgcgtactcggcctcttcgttcttggccagcaggcagcaaaactgaagagcagcagacaaggcggtcagcagtggctcaagcgaggcgcagagaggatcggcaccgaccttgatgcacatgtcgaaccagaggctgatgtcgacgccgcggagcttcgtcgcatcaaagtcgtcggacgtggccgcatcaccgtctggagcaggggcgccagggtcagcaattttaagagagcgatctgactgcgagaagaacgaaccgagctcgcgccgcagccgctgcgacatcatggccgcctcgtcctcaacggccatgttcttgcgcttcttcttgtaggtccgcgagcggaatccaggccggttgcccttgctgtcgatgccggtgtacttgatgttctgcggacgatgagaagcgattgggactaaggggtcagccagcacgcatcggcacgccagctgcaaaggagtcgcccaccttgtcctgcggaaagagcagcttggtttgtcggaagccctcgacgagctcacgcgcaatttcgagccattcctcgaccgcctcgatcgaatcggcgtcgacggcaggatcgagctgggcgagccgcgaaaagcccgcctggacctttgcgagcatcgagtcctcaatgaccgtctgggtcgcccgctcgcgctcccgcttccggtggagggcggcgatccgggccttgtcgcgcgtctgcttctcctcgtcaaagaaggaggtgatgctgccgccgggcgcgcggtctgcccgcagctcctcctcgtcgtcgagctcggcctgctttcgcttcttctgttgccgctcaaggactgcggatagacaaaggaggcgtcagacatgagtttgtaagacagccgagcgaggcagaactggactgaccgccggtgacaagatcgagcgcctccctgcgccggccgagcggctcgtacacggcggcgagcttcagctggacacgcgagaggctgtcgtcgtcgccctcgaacgcagccgatgctgtcgagcaggaagccaaggccggaatggtcagccttgatcgcacggatgccgggcaaggaacgcaccaaactcgtacgactcgcttgcgccctccaagtcgttggccgctcggaggcagtctccgcggccctcgacgtggttcgggtcgctctgagagacgatacggaggtctggttcagcaacgagggtcctgcgcaggtgatctgcgcgcacttacggtgatttctgcgagggcctcgtagtagacgattgcgtcgtcgtagaggcgcgcctcgaggaaggcagcggctacctcagaccagaagaccatgtaggtcgccgggtcgagcgcgcgaatgaactcgaagtggcgctgcagtcgaggggcaatagtcagcgaggcgcctagcacaggtcaagaagctagcgaaggacgcactcgcgcctcttcaggctgcttgagcttgagccgggcgagtccgagccgctggcggacgttgatgtcaagcgggaagcccggagcgggctcggcgtgcggcccccgcttgtagccggtgacgtcaaactcgctgtcatcctccttctgggcccagcgaatctggtcgtgccggccctggagccagcggacggccgtcttcgtctcgagcagcgcctgattgtacttgccgctcgcaaagagcaggtcaaagaggatgacaatgactggaatcgagaagagctcggactggtcgggcatctcggccggcagcggatagcgcgcctgctgcgagtggagcgcggtcaggatcagccgctggccgagcgggatccggttcgcctcaacaaacgagtgcgccatctcttggaggatggcgacgtcgttcgggaactggttgaggatgaggccgaagccttcgatggcctgcgagccggcgggtgcgtgtcagtaagacgcgccggtcatgatgcgcgggcgactcttgatgcaccttgacgtgctcgccaatctcgcggaaaatgaccgaacggtcccagagggcgtcaacgtcctttgggttgatgtcgagcgccttcttgtagcagtagagggcctgcatcgccatgccgctctccctgcaaacggccgtcggtttagtcagcgcgtcggcccgcaggacctctcggcaggagcgagacggaccggctcttctttccgacctccttccacgtctcgctgttgatgacgagatgggcgccgacgatctcgcactggagcgccttctcggggttgccaagctcgcggtggcacatcccaagcccgatccaggccgcggggaccgagggctcctcgtggatgacctgctggaatgagttgatggccgcgagccagtcgtgcatgacgtaggccatgttggccttaccgagtaggtcctgcgctgcgggtgatggcgatggctggcggtggccgcgcttcttccgggtggtgggcgggaaggagccctgggtcagccggagctcctgagtcgacggagctcgctacggtaaagagactgctcacgagctttgccttgcgcttgccgacgccggtcgccgcccgaaggccgctcatgaagtcgtcgtcgacgtcgtcgacgtccggctccggcgcctggtcgtcgagaaagggggctgcgctcgtgaggtcggtcgtcgacttgattgacatgatcagccggctggcaagcgtcggtgaggtcgacagatcagctagatctcagccggttgccttggatgggctgaacgggcgacgcactcaaactggacggcgccttgctgatcgagatcgtcccggccagactcggaagccggccggtcctcgacctcctcgtcggtgccgtcgctcgggtcgttgtgcagctcgagctcctcgggctcgtcgtcgtcttcttcctcttcagactgggtgtactctgagtcgccgtctgttcagtaatatgggctccgttcagctggttgcgacgtgagaagggagagggcgaccacagagctcgagacgcaccggtcgagaagtcgtcctcccggccgggcacccagcgggccccaccgacgtcctcaaagtcttcggtgtcagacgcgtacgacatcactggccggcaatgccgagtgctgccccctgttgttcaaggcaaagggcgaggcggatggcgacggagattgagggtcgaggtcgggagctcgcgtcctcgtgctcttgacaacgcccaggtcgacgcgaccgcgtgctcgtgcgtaattgatcgacagcagggccacttttcgataaactgtctgacgacggaaagtaaggcaaaggagacatccatcggccggcgctgccccaggactgccgagttcaagtctccggcatgcttgagctgtcgctgacaatcctgtcggccggtgctcctgtcgctccgccgcctggcgcgcagctccgttgacttaactcattctgtcggtcaagatccatcaagaccggtcgctcatcagcgcgactagggatcgtagccagcctgaaatagggctgcagtaccaactcagggtattggggcggtcgagggaagggtcgcatcgacacgtcgctgtccattctcgctcggtctagccgcaaaacggggcgtttgagggcagagggaggtcgtaagtcgaagaagagcgacggcaaggctaggggcggaccagtttgcagaaggatgagagaagcagggagaaggtggcaatcttatattggtagccaggaatgtaagtagaagacagttgggcactaggcccgagggtggagagatgctctagtgggtacagaggtttggcgggcaggtcgctatgtgtccctcgcccctctcccgtcagcttgccgaaaggctcaaggcgggcgaggttgaccggctgtagctcctcccctcgcccctcttaccaatgctcgacggcatcgcttcggtcgcctcagccgcctcgctcgccaacgtttccccagccgctgcctcgctcgcttcggttgcatctgtctcggctgcctcgctcgtcaacatccaggctgctgagctcaatgctggcattgccgcggctctctcggtcccgacttccacgtcgatgaccccgcgcaccgcaagtaccccgagaaaggccgcgagaacgccaagaagtgacgcaagaaggccaaccggtcggctaccacgatgacgacgcgccaggacgtccgccacgcgcgcacaaagggtcctgcggccaagaaggcggcccagtcaccccacaagcactaatccggactactcccactgtcgcttctcaccaaccctccgcccgcgcaccttccgtcaaaattctctcccgccctttgacgcccgactctcagtgacgagattgaaacttcctcacgttttcagcggcgacgggagcgcaagctgggtttgttcgggacctgacgagcccaccggtgggaggcgtgcgagaggaagagcatgcgtcgaatgtagcggagggggacgaagagcaagcggcggaagagaagggggaacgctggcacgtgagtgactgggggtgagagagcagggcgggttttaaacgggttcgtcatgttttgaccgcaactcagaaggccggctcagcgggactcagcaaaactcaacggaactcagcaaaactcagcaggccgactcagcagactcctattcgacttttgcttactcagaagcccagaccagaattacctgtccacgtttggcttgtcagcaggctcttaaggggtgtcgaactcgtcttgatgcaactcggatcggaaacagggtctatgtacgtgatcgctgatggcgggccgcactcgcgggagcctaacgccgctgactgaaagtcacccctccgagggcaggcagcacttcgaggcttgaagctctttctctatacgagaacagcatcagcagggcctgttgcgctctcgtgcctctctagctctcgcgtcgactgagctcgtgcaagcagcaagagcagcctcgacaggacagggcacatggccggagcttcgcccacgccttcctcgatcgctctatacgcttgcccgcgctcgcctgcgcccgcccgcccgagactaagacgtccttgaaacgtcccgcctgccaaccaacaccctccgacgaccaacctcgacggcttcccccccagggcgcctcagagtcgccccttgttagccctcccgtcccgttcccctgcgcaggtcccatcccttccgctaatgaccggccagcctgacactagccgtcggctgcagccaagcttgaaccctgctgctcaccaacgcccgctgcccctcctcctcccttcaaagtcggcgagcgggagccgtggcttgctccttcttgcttcctctttccatcccgccctctactcaagtctaccgccgtcgccgtccggttcctctgcttcctgcgctacccccctctctcgctcttccgctccgccaccatgtcggatctcaaagtcgcccagccgaccgccgtcgaggccgcccagcagccggctcccgctcagaagcgcttgcaccgccggacggcctcggtcacgtcgctcgcccttgcctgtgccttcacctacctcgcctttgggtccctgagccccggccgctcatcgtttgtgcctgactacgacatctcgtgggccggctcagccgcggcttcggccgacgcctcgcccctcgccgatgcgccccatctttcgtggtcgccgccctctgcaagctcgtccacgccctggaccgacgccggctgccggtcgctacccaatctctctggcggccgcttcctttcgaccgtctgctgcgcgtcgaacaaggacgccgccgacgacgcgacgagggcaacgctctggctcgtccggagtgatgagctcgaaccggcagaggaggacttccgggtcaaaggcctcgggctactgaaggctgagcgggctgagcgccgcagcggccggccggtcggccagtcgaagctcgtccgacctctcgccacgaacgagggcaagagtgcgtgctcaacctttccgctccaatagacacccgacgctgactcttttctgtcctcaggctaccgcttcgactttgccatcccagagccgacctccgcggacaacgcagactacgtctcgccctcgatcaacgttttctttcaaacagccaagcccatcgtcagtccccaagccgagcgcacgacggctgtggttgcgcctcgtctaactccccatgctctcactgcagatctcgatcgactcggccacgccaaagcgttacgcccggctgttcgacggcccggtcgacttgggctcgctcacgtgcccttcgaaccgagtggcgcgcctcccttcgggcctgccactctcgatgcgcatcatgcgccgctgagcgccgcccagccctttgttctcttcttcttgggaccttgtctgcttgtgctgtactgttgcttccctgtctgtgctcctgattgtgtaatatctaccttcctcttgtcaaagccagccggagcgccagagacccggtcgcacgtgcatctagaccgaagtgctcagcgcagcctctggctcgagcacgactgcgacagggacggcgacggtagagtcgccctctgcgagctcgagccgcttggcctcgcgctccttctcctcgcgctcgtcggcccgctcgcgcttcgaccgcttggcctcgtacggctctgcggcgccgaaaggacgtcagtcaaacgagcggttgacagaagggaacgagaaaggcgcaccccggaaaaggcgctctcgatagctcttgagctcgaggatcgattggacgatgtcgtccattgcgcggtgggcggcaaagctcgggtcggcctgggcccgacaccggtcctcgcgaagcgtcttctggaggttggggaaccacctcgtcgagagctccttgattgacgagacgtcgacaatccggtagtggagccagtcgacgattgagggcattccccggccgggctcgagcttgaggaaggccaggtcggcgtggacggtgttgccggcgaggacgccggtcatccggttcgggacccgcgtcttgatgtactcgagcacctgctgctcgacgtactcgagcgagtagggcgagtcgatgcaggcctgcgtgaggcccgtctgtgagccgggcaggtcatcagaagaatggtgtcagtcggtgttgctcaggaacagtgggagagtgacgaagtcgagtcggagcgacacacctttccgtgcatgttgacgcaccactcgcccatcgcatcgagcaccgccttgtccgtcttgatgacaaacgacatgccctcgtcgaccgcctcgaggttgccgttcgtgatgaccacggcgatctgagcgagagacgcgcagcgtcgtccgggacgagaggtgggtggccatcagctcgcctcgcgcatgacgaaggattgcacggcgagaaacgcacctcgagcagccggtcagttgcaaggtccagaccagtcatctcacagtcgatccagacgagcgggccgtcctcctgcgagggtaagggttgggtcggccctccggcgctggccgacgacgcaggagcagcctcgacaacgcaccttctcgaggactttcctgtcgcacgttgcaagaacgggaagcgccatgtcgtctatgggccgagggatggatgagcgggcgcgaggggcgggctggacgagcgaatgacgactggaggcaaaggttggaggaaggcgagggcggccagcgaggagagacgaggtggctccgggaatgctcgagctaacgaaagcaaacagtcggcggctagacgtcgagagtggttgagtgaggacagatgcgagtccgtagggtatgtaatctcgggataccgagcgagagggagaggctgcgaaggcgcgttcgaagcgagccgacgaaggcaagacggaggaggtcagccacgcgtgcggatgagcaccctcctgacagggcgcaggcggcgggaacgtacagcgataggagcagagcagtcaacgttcacgagtagcagtcaacgttcacgagtagcccgtcccagtgattaggggtctgtcgagagtgtgtgggagcagcggagggagtcgtcgtcaagggtcaacgagaaggacgcgacaagctcgagatgaagccgaccctccgaccagcaccttgcccatcaacgcctccgaccgcccctgtccccttctaaagcggcctagaaagcaagtgccggcagactggacaccagccgctcgtcaatgtcggtcgtggaggagtcctcgcctatgccggaccaaggctcaagtcggccgcatccgcggacgcttctgccggccgagctcctgccgcacctctcgcacctccagacggtcgagtctggcctctcgcactcgctctcgcaggccctcgttgaccggtcggtcctggcgtcgtcgcactcgcgcctcgcagccctcctcccgcgtatcgacgccgtcgactttgagctcagcgggcgcgatggcgccgagggcgagggcagcaagggcctcaagggccgcatcgaggtcgtcaatggcatcgccgagcgcgtcggcggcaaggtccgcgggctcgatctcgagctgaagcgtgtgcgggaggccaacgaacggcttaacgaagtcatcgagctgaaggtgcgtgccgtgcgggctggctcggcagccacgggtggtcggttaatctgacccgagatggtcgcctctccctgcccctcgcagtctgccctcgagatcctgcgcgcgtcgatagaagctcaggagtgggagacagctgcccgctcgtgtgctcgagcgctcgctgtgccagcccaggtgctcagcggccccttcgcagctcgagttgtcgtacgtgctcttcgtgctgtcgcgtttgcgtgcgcgcaggctgacctccccctcgttggcccgcctcgcagccctcgtccgataacccgctaccgccagcccaggcgctccaggaactcaggcagacgcttctcgagaccttcaaccgccagttccacatggctgccgtcggccgagacgaagttgcgacgagccgcttcttccgcctgtggcccgagatcggagccgaggtgcgtcgtcgcgccgtgacccttgtctgtcggatgagtctaatcacgagggtttgttcggaacgagtagaaggagggcctgcagtcgtacggcgactttgttgtcggcctcgttcgttcgcgcaatcagtcgtccggcaagagtacgtcgtctgcgagcagccacaactgcgctcccgtgcggcaagctgactccctcacctgcctctcccgccacagcctcgtcgccaatgtactatcttgcgcacctgacctcgctcttcgagtcgatcggcctcatcatcgatcagcaccaaccggtcgtcgaaaagtactatggcatcggccgaatgcgatccgtcgtcgcgcggctccaggtcgaggccgaccgcgtcgttgagagcctcgtctctggctgggaggaggagcggcgggcgcgccgggtgctcaactcgctccgcgtctctgcggcaaagcagtcgaccgagaagccgcctgcgggaggcctctcgagcacccatctgtcgtcgctccctaacgcggcgacgtcgctcctgcagacgtactctcggacgcggatcgtctcaagctcgacgccgacaccaacaccaccgaccggattgcatgccgaagaggagggcgggccggatgcgcgtgaagtcgacaagctccttggcgagctgacggcgatggcaggccggtggggcctctaccggcgctttctctggtcgcgcttgcgggtaggtttgccaatgatccgccctcctcgggtgtcccactgactctgctatccctttctcgccctcaaaggaggacgacgagccgcaagagcagcttgacccggcatcgagcgccttgcctccgccggcggtcaaggccaacggcgagaacgatgaggaggccgacgtgctctcaatcgtcgagtcgtcgcgctcgctcgcctgcttccaggaagtcctccgcaactattacgagccgatggaggtctggtttctccggacgtcgaccgacaaggccctccggctcgacacgcccgacacgagctcgcggccgcacctgagctcggccccggatgacgtcttctacctactcaagctcgttctctaccggctcgtccactcgggctcgctcccgacgctcgagcgcatggttgccaaggtcgaggagattgtcgaggacggcttcctcggcggcatcaaacgcaagatggacggcgtttacgctggcgtgaggagcgccggcctggctgacgccaagagcggctcgggcggtgcgctcgccggcaagggcactgaagcagacaggctcgagcgcgagatgcgcggcaccttccttgtttgtccagtcgctcgttccatgtggtcaacactgctgacatgtacgcgcctctcagatttacgcgaacgacttggacgtctcggccggccacctcgaacggctgatcgaggagctaaccgagagcgacgcgctcggtcaggccttccttgccgaggaggttcgcccggccaggctcaagatcaagaacctcggcgcgctgagtgagaagttccggagcacgctcaaggtccgtcccctgcaaccgtcggctaagagcgttgccacccgcctggagtgctaatcgccgcttgcgcccaaacagagcggcgtcgaccagctttttaaccagctcgtccggccacgactccggccctttatcgaagactgctacaagggcatctcgtattcgctcgacgaggacagctacgccgacgccgaattccaggacgtcgtccgcaagcgcttcgttcgcggctgggaggccctgctcgagggctatcgggtgcgcacctccatactcttttcgtgtgcagcgcctccagctctgacctctactgctgtccggcgtcgtagagcgccttcacagacgagaattaccgcgatttcttcggaatgtgcgtcgaagtgctcgtccggccgtgggagaagctcctcatgggcatgaaggtgaccgaggtgcgtctcgaggctgcttgcaggaagtaattgagcctcagcgctgacttttcgcggcctgcagcttggcgcgcttcgcttcgaccgcgacctccgctcgatctctgccttcctctcgtcccagacgagctttggcggctcgcgcgaaaaattcatccgccttcagcaaatcgcgaccgtcctcaatctgggagcggtgcgttgagcttgttcgctggtgccccttcgttgccctcagggctgacggtgtctcgcttttggcaggacgaggacccgaaagactttttcctgcagagcggcatcccctggcggctcagccgggcagactacgacgcggcttacacgatgcgcgcatagatgggaccctctcctacgccgtcgcgacctcgagccgcgctgcgatgatcagagatctgggaagcgacttgggccttaagcgccggcgagtgcggctgcaagttcggcgctgaacctcgaaagcgttcaaccctcgctccttccgccgtgggtggcgctggtctctgccgcctcaattcgcggcgagtcgcgcaggagcgacctcgaccgagcgcgggccaggcgtcggtgtgcagcaggactggaagccgtccctcttgttgctgggcgacgagctcgtgcgccccctttcgcatctgcgaggagacccagcttgccgcccggggaacggtgattgggcagatcaagagagctaagcgcgacgccttgccaatctcgtcgcgggctcagccgaccgaccgccgactcgtccctccgaaccccgccctctgcctgccgaccagcccttttcactccgtcgcctcttctctcttttcccatccaccacccacccacccctctcatattcagaccatcccttgctccctcactctctttgcctcaaggatgccctccgtcgccaagtctgccgatgcgctcctcgagttcggcacccagatcctcccctccggcatgtgcgtcccctcgtctagacccggcttggtagccttcttcgagcatccgtccttgtcccttgacgtccagcgcttacctggagaccttgctgaccctctccgctcgctctcttgctcgcttttccttactctctagcggccgcaaatgggacatcagtcagtcggcctcgcctcccccacctccttcggagggctcggcgcctcgcagtgactgatttccaactctcttcttgcgaaacgacagtcatggaggagggccagggcctctgggtcaccctccaggacggtcagaagaagctcgacttcacggccggcatcggagtagtgcgtgcctgctcctcgcgtcgcacccaccaccaccaccaccgccgagcaccgaggctgacacttctcccatccccggtcctcctgcagaccaacctcggccactgccaccccaaggtcaacgccgccgccgtcgcccagatctccaagattgtccacgctcagtgcgcgatcggcatgtcgcgcccgcagcttcagctccgtgcgttgtgccgaccgccttcgctcgtcgaagcagcgctcggtggctgacctctttatccctcgcagtcgacaagctcgcgcccaagctgccgatcaagggcgagagccagatcttcctctggaactcgggctccgaggctgtcgaggcggccgtgaagattgtccgccgggcgaccggccgcaacaacatcatcgccatgcagggctcgtatcacggccgaacgtacggcgcgagcgcgctcaccaagtcaaagacaatctactcgcagaatgtcggctcggtcatgccgggcgtcattatgacgccgttcccgacgtggcacacgctcggcgtctcggtcgacacacccgaggccgagctcgtccggctcgcgaactaccagctcgagctcgtcctcaagcagcagtcggccccgaccgacacggccgccatctttatcgagcctatcctcggcgagggcggctacattcccgccccggcggcctacctccgcttcctccgcaagatctgcgatgagcacggcatcctcctcgtcgtcgacgaggtccagtcgggctacggccggtcgggcgccttctgggcgatcgataacgtcccggacgtccagcccgacctcatcatctttgcaaagggcctcgccaacggcttcccactctcgggcgtcgcgacgacgaaagccatcatgcagacgatgaagcccggctcgctcggcgggacttacgccggcaacgccgttgcttgcgccgccgcgggcgccgtcctcgacgtctttgccgaggaggacatcctcggcaacgtccgtgcgcgctcggcccaggcatttgacgcgctccatgcgctcgcctcgagcccaaagaccggccacctgatcgccgacgtccgcggctcgggcctcatgatcggcgtcgagtttcacgacccggccgacccgatctgcgtgctctcggccaaggcaaaagcggccgagggcaaggccgtcccgtccgacatcccctcgcgcgtccaggcaaagtgctttgagaagggcctgatggtcctgacgacgtcgatctacccggtcatccgcttcatcccggctctgatcgtcaccgaggacgagatggcccaggcgatgaacatcttcaaggacgcgctcgaggaggtcgccctcgaaggctgagtcgcacgacctccgctcttctgttccgccatcctttacttgcatatttttccccttcacctcgaatctctctgggccctcatctgtctcctttgcaacctgtaccgcctccccacccgacctctcgactctgtaccttttatcctacatgacgtttgcaacacgctctgtctttggcttgcaacagggaaggtcacgacctaaatacgagaacgggcgattcgatcaacaacgggagacgagaagagagaggctacaacgggagggagacagggcttaggcggacagtcggtggacgagcgagaaagcaacgaccgacggaggagtgctcaagggcgggtccactggggcgaggcgagggcagttcaaaggcgtgccggccgggttaggtccgggtcgagctcggccattaggtcgctaccgtcaggtcaaggaaaagaggggggtccgtcaatcagcgatcgatcgagaagagtgaagatggaaatttggcgaacgcacgacgtgaggaactcggccgggaccgccgccccaacctctccaagcaggtacatccgcgccctctcgatcttcgccttttccagcttccctccggccgagcttgcgagcttgaccgcctccgcctccagcacgcccgcgacgagctttagcgtgatgggctcgccgtcatcgagcgccgcgccgtgcttgacccacgaccagagctggcagcgggcaatttcagccgtcgcggcgtcctcctgcgtaagtttgcgagaagggagggcgtcagagattgcagatggcgaggttgggatgaggagggaagaaggggacgggaccatgaggttgttgattgggacgcagccgttgccgctgatccagtaggcgcagtacgcgagcgcgctgaaatagtaagcgagactcccatcgtcgtcagcgaaaagctaacaatggaacagaagctgggggggaacgtacgcagagacgttgtcggtcaagccgtgccgggtaatcttgccagggacgctggccgagacgaggtcctccggctggacgtcgacctcctcgcgccggatgtggtactattcgcggcaatgagagaggccagaggggccgtcagcgaccctccgtcgacccaagcaagcgcgagcaggcaaagggcgacgcacctggttgggcccgagcatgaactcgtcaaagacgtccatcgccaccttgaccaacgccggatgggcgacccacgtcccgtcatgcccattcgtcacctcccggaccttgtccgcccggaccttgtcgagcacccgctcgttcgcctcggggtcgcccttgatcggtatctgggccgacatgccgcccatcgcggcaaccttgcgcttgtggcacgtctggatgagcaactggacgtaagacgccatgaaggggaccgtcatcgtcacctcggaccggtcgggcaagacgtgccgcttatgcgcgcgtgtcttcttgatgtatgagaagatctagacgagcgggggagggtcatgagtcaggcgcgcgaaggagagaaaggcagtgagagattcggggacggacgtagtcccaccggccgcagttaaggccggccgagtgctcgcggagctcataaatgatctcgtccatctggaaggcggccggaagcgtctcgatgagctgcggccagggaatattgagaaggccggtcagtatcgctcgctcggggggttgctgagaggcgaaggaaacgcacgacggtcgcccggatcgtccccggctggatcttgacgtacgcctcggcaaagcaaaagacgtcgttccacagcctcgcctcgaggtagtgctccatcttgggcaggtaaaagtaagggccgaaaccccgcttgaccgtctcgtgggcggagtggaagaagtagagggcaaagtcgaggagcgaggcagagggggcaacgccgtcgatcagcagccgcggctcgaagaggtgccagccgcggggcctgcagagtggggaaaacgtcagtcagcccagcccgacagacgacggcgcgcgcgaggagggggacgcaaccggacgagcagaactgcatgcttctcgttgagcttgtagctcttgcctccagactcgagcgcgatcgtctcgcggacggcgtcgcgcaggttgatctggccgtcgagcatgttggcccacgtcggcgcgttcgaatctgtgcgtcgtgcgaagggtaggccgtcggaagagtcagatctgaagccgagatatcatttactggaggccgttgtgcgtaccctcaaagtcggccatgaactgctcggcgagccacgggcgacacagcaagggaataagggcggcagggtcagtcgggaaggtcctccgcgctcatctgggtatctcgacgtggagccgaacgccggacgttcggctgagagacgagacgtagtgagacggaccgtctttgcgcccgagttgagtgcttgaagcgagcgatgacaggaagggcggcgaagagggggatcagcaactaggccgtcaaaggctccagcttcgtgccagcggcaacgagaaagagggatcgcgcgcgcaccgttgatgaccatcttgcggtcggtcgggccggtaatctcgaccctttgtcggcagtgaggagaggatgtggtcagtcctgaccttatcaaccggctctcgagcgatggccggttgactgcgcgacgcgacgccgacttaccgccggtcctccaagcccggcccgaccggcgcgccccgccagtcggcgctcgcacgcacatgcgccgtctcgggcgggaacgtcagctgtgcgcctttgtcgagctcggcctggagcgtctggcggttcgcgaggagctacgaacgggcgcaaggggggcggggtggtcaggccggcgcgcgcggcagagaggaggaggaggatgagggacggaccgagagacgcgcagcatcaaacgttcggtggagggcgccgacgaaggcgagcgcttcgggcgtgaggattgaggcttgggcggggctgacggcgcctgtgcgaccgagagagcaggcgagcgaggcgagtcaggaggagggagaggggatgatcacgagccagcgcgcgcaggcggcggcccagatagcgcggcgagcggcaggccaaggaagaacgacggaccgagaacctggatgcccttgacgggcgtgctgaacgagggcatgctgaagagagagatgattgcaggatgtgcaagatgggtgtatgcggtcgtcgacgagaagctggtcggtcgtcgctgcttcaagtaggcaggggccggccgtcggctcgccgcgttcccgaggctcgtgcgaacctccccgacaggcggccgaagcagctgatgccgccccgcctcgccgagaggacccgactcgtcctagcgtcggccgacaaggggcgaccttcgggcgctgtcggtcgatacggacgggctgcgacttggcttgcctctgcctctgccttctgactcgccgctgtcggcacgaagggagatgacgttgctgcgctcgctccttgctctctgcctcgacgctctctgccggccaaccgatgcctgccgcggccaaccgatgcctgtcgctccgtcgtcccttcccagcctcccttttgcccctagcgcaaagcctcgcgtcgcactctccgtcttccgccattcgagttgtcctcttgctggcaacgcgccgacccagacccgaccccgccacctaggtcaagaagtaagtcgcgaaaacgccccatctatgagccaaagaagccgaggccgcccgtcgtcgcagctgccgacgccgacatcgtcgagctctgggaatcgagctgggcgtttgtcgctgcaatcaggctgaggcccacgtcgcggccggcctgaatgggacgggagagaagaaaaggagagagagcgttcagtctcgagtgtctctttacgagggcgaaggaaagagagggccagcgtacctcggtcaagcggcgcatgtctcctaatccaagctcggcgctcccgatgagccggaggccggcgagcgtgccctttggcccgccggcggaagagacaaagacgagcaggtgggccgggcaggcgatcgcctcggccggggtcgggtcgagcaggtgcgtgccgtttggcagctgcgttcggccagtcagcgagggagcatcagcgaaggcaaggcagagagagagagacaggggggagagacagagaaacgcacgatgtggagcgtgatgcaaacaggcagcgcctccctgacctcgctcgcaagcctctcgccgtcctcggtcgaatcgacaagctcaaactctgccccagcggcaaaagccttccttccctgctcacctcccttctttttcgtcttgccaccaagcgcagcctgcttgatgccagccatgtcgctctcgccctcatctcccccaagcagacttgcttcgaatgcaacgttccgcgtgaccggcacgcggaggtctgccagtgccgcgcgaagcgaaaggaagagggcgtcgacgagatttccgccggcagacgagaggacgaggacgtcgatcgtgtagtggaaggcgagaagcggggtgatcggctggcgagggaggaggggcggaatcgtgtgctggacgagcgtcgtcaggtctgcggggggcgggcgatcgatcaagagagtgtcagcctttcgagcgggtcgtcgaggcgaagcgacgaagggagtgcaaagagagcaagaggggccagctcgagtgcggcctgcactgcagggatctgggtgaaagggggacgcacactgcgactgagcctcgacagccttgtagtcgaggtgcgggaaggcgctcggcgcactgcagatccgtcgagggaggtggtcagccttggtcgtcagccgcttgacgacctctgatagcgtccaagctcgacagagaggcaaaggaagagggggaggcaacgcaccactcgacgctgcagacgacgtctggcctcgctccgaccgagctcgctccatcccctccacccggtgcagcagccggccccacctcgagcctcgcagccgtcacaatctctgtgcccgggccgcctcccgcccctccgccaaggaggactcgggccgagccgttcgcctggggcgcgacggccgtcgcgagcgagaaggcgcggaaggcgccgagcggccggccgtcggcccggacgggcgtcggtaggacgagggcatcgaggatgaaggacgactcggcagccgagagaatcgaggtcggcggggccatcgtttcaatgttgtactcggggcgggacctcttaaaggatggcgaagggagggtgacgttcgggggacgactctcgagagcggtttcgactttcgttggccccctccgagcccgttcagccgtcacgacgaccctttccttgacctcaccattcgacccaggccaaggactggtcaaaggctgtcttggacggtcctctgcagcatggcctaccgaccgatccagaccttccagggccggcccgagtctcagcagcctcaacagcagcaatacggcttgtgagcctcatgccggccgccgtgtcgaccctctgccgaccttaaggggctgaccctcgctctctcttcgcttctgatcccttctgcgacgtcgcctcggccggtctctgtgagtcatcatctgctccagtgtgccagtcgaacgccgtcctttaaccgtttgtgcccgtctacagctctcgaaaccctcctccgaacggcttccggctcccccctccgacgaccaacagcactggccctttgcggcacccgccgccgccggcacactacgatccgtatgctcagccaggctactcgtcttacgctccgcacggcgctgagcgggccggctggcaacgacatccgcatcagcagcagcaggcgagctaccctcagcacacgccgccgtaccatcctcctccggccggcgcctggggcggctcttcatcaaggccagggggctatccgctccacctgccacctacgacactagctcgcggcccgtcacatccttcgcagcagcagcagcagcagcagcagcagcagcagcagaggtcgtacgcttcgtcggcgagccatgacagccaccgggacggccctcccccttcgacgcacgatcgcggcgactactactcgtctcgtccccaccactaccaccaccagccacctcaccaccagcagcccttcttccagaaccaacgagacggccgctacgctgagcgcgactcgcgccatccaggcccagattcccgccggcgctcctgcagccccgagctgcacgtaccgcggcatgtgaacgaccatggcggtggcggtggcagacaacatcggtcgcacgcgactagcggacggccggagcgctctggcgggaggatggaggaggtcatcgactggaagtggtcaagagctgcttcctcgtccggggtcgcctacccaccgccgccgccacagccgcagccgaaacggcggatgaagcctcgcgaatcctacctcgcaacctcgctctccaccccctcgcgccttccctcgccctccgaccccaccaccgcgcccggcaagaagctcattctgctcgacctgaacggctcgctcgtcttccgggccaacaagcagcaggcagactcgtaccgtctccggccgtttgtcagcaactttatcgcctacctcagaaagacgtacgaggtcggcgtttggtcgagcgctcagccgcattcggttgggaagatggtcgggtgcattggtttgagggtcgaggtagacgatgcggcggcggtggcgggcggcggcgccgggcagcaggggcaggagccagcagcgggcggtcaagctacgaccgacgtcaagctcgtacccgaggatgccagagcgccacgaatgcaggcgcgagccgacgctgacgccgaggcgctcgtcctcaaggtgctctgggcccgcgacacgtttggcctgagcgcggccgagtacagtgcggtcctctgcatctcgagaagtcacatgctgccgccatgctgaactgcgcttttgccttcgctccgcttcggttcgttcgtccgccgcagaccagaaggttgacacgatcaaggacctcgaccgcatctggcagcacctcaacagccctcctgccagtgccagccctcgcccggcggcctacgacgcgctcaacacgctcctcctcgacgactcgtactcgaagacggcctgccagccgttcaaccatctccccgtgcccgacttcaatcaagcgatcgcaacttcctcggcaagagcgtaccgcgccgcactggcgtttgcgcaggttagcgggaagctcgaagagatggagccagagttgagggttgattgggagcggtgtgtcatcgaccggagcttgttggggatcattgggatcctcgagagggcaaggggagaggcgaacgttgcggcttggataagggcgggcggacttgtcccggacctggaggacccggacggctggtggacgaaggaggacgacccgactggcggcggcggcgtcgaggagggcggccacgaaggcaggacggctgaccgtccgccgccggctacgaaacggctcaagaagagcaagcagcgtaagacgctcggcctcgacgctctgcacatgctcgtcttcccccctccaccctcttccccatcctcctcctccccctcgatacttgctgacatcgagacggcagtctttccaggaaatcatgcggatacgaagcagcggaatggggatcgtcacaaaggggagcaagcgaaacaaaggaagagggacaaagtcgaaaggggtggtgaagggagcgtccagcgctctaccagccgtcatctccgtagcggtcatcgttctctctcggtcccaaacatcgtcttgggcgccggaggggtcggccgcgggctaggcgccttcggaagttcggccgcggaggcgtgtccggaaagagcaacgccggccagccggccgtcagcccatgcgtccacttgacgaagagcggctcgtcagatggccgcacgggctcccgggcgttcttgcgcggagtcgtgggtgtgagcggcagggtcgtgatcggaccggggatggcctcgacgacggcagtctcggcggctttggcgacaggtgcggtctcgtcgcggacattcttggtggggaccgcggaaggggcagtctcctcgtcgtcactggcctcgacgtcagagtcgacactcatgtcggaaccggcaactgaagctggcttcttgaccgaggcattcttgaagatgccagtctcgacgcgaccatattggaggtgaaggcgtcatcggcggccgagaactcctcctcgacggtcccgacggcgtcaacgatggcagcagcctcaactacgacggcggcctgtacaactgcagcttcaacggtgaccggcttctcgcggacgacatcgctgacttgttgctgaagcgcgacgacaatagccttaagggcggcgagctcgccgttgagactgacaaactgggcctcgcgctcagcgtcctttgtctcgagcaaagcgacgcgagcaccgagggccgcgttctgggtcttgaggtcgtcgagcgtgttgtcgacaatgacgtgagacgggccggcgagcgaggtcgagtttgacgttggaatcggggccgcggcgaggatggcatcgagagggtcgagcccggcgacggcgagggcatgcgttcgacaacggcagctgcgcctgaagggtcaggaagggaggcgcgggtcaggacggcgctcgcagagagggagagggaagctgacggagaggcgggacgggcgcttggcttggccttggccttggtggtcttggtggtggttggcttcgtcgtcgccggctgggtgcggcccgaccggcgctggccgaggttgacaatgccggcgaggatggcgcccttcgtgctcgaagggatcttgaaagcgtcgagccgcttcctgaaaggggacgcgtcgaggcaggcgggtgggaagtgtcaggacgcgttttggacgggacggcggagaggaggcaacgcagcagaggacatacgagctaagaatggtcttgacgaggtctttcttgagcatcttgtcggtcgtagggatgctggcggtctggagggcggcggccagaaagaagcgggtggcgggcagacaacagacgggatgtcagtcgcgagaacgcggtcgggaggaggatgaatggcgacaggcatcgcgagacggggtggataggtgcggtaggagcaggcaggaggaggtacaggaggcagggaggagaaggaatggatcgggctgagaagagggacgcaccttgcaagcggcgacgaggacgggcagggtctcgcgctggagccgggtcgacgtgaagacgagcggcgcgggatgcatggtggataaggcgtgcgagagggtagcgctggagaggctaaggttgcaagaggtggagtggaagggttggagggctaagggtgcaagtatgggctggcggaggaggtggacgtcggaagggaaagccagatcgccgggcagaacgcattcatgagcaacaggcttcgagctgctgcgcgcgccacctgcttccgcacgcagacgcgttcgtccaacagccttaactcctttgactgatcttgctcgatgcgtcaggctgactagaggtcgctcaggcaccagaaaatgatgccggtccgtccgctccttctcgacccgctcgaccgagcaatgccggccggcaagggcccgagatcagtgaatcagcttccgacgaggccgcgtacacccctgagctcgcggcagagcctcgagacgttgcttttttttaaaacatgcgactgccggcactagtccgatcaagaggttgaaggacaagttgaacagagacgaggtcgcaatcgatcgtggcgatgccaaccgctcggtgcactttcctcccttcttcaaacacagagctggcaggaacgccgtacctggccagtgctctcagagaagtcatccgaggacctgacggacagtcagctgactggatcagagcgaggtgcacggaggatgtcggttcgtgtgcaggtgttgtgatgagatcagagcatagagatacaaggcaagcccccggaagggcgtctatgaggttcgagatagggacaggccagatggaggccagccctttttacttttactgcgacgagacggcctccttggcctcctcgaccgcgggcggctctggcggcagcggaacgtcctcctcgtacgcgaagtagacgaggacgccagtgactagagggaggagcaggctgagagtcagcaagccggcccaagatcaagttcgaaggaagagcgacgcacgagcgcagaggacggcgaggaagccaaacgtcgcttggtaactgcagaggagaggagcgcgaccggagttagcgggattacggcgagaggcacaaacgagcaagggacgcacgccttccagcggacgacgccgtgcccgccgacatcgcccgcaggcgcaggctcgatgtaatttgccttgaggctcgcggtgatgctgaggacgatggcagcgccgagctggtaggtcgagttgagcgtcccgccgacgacacctgcgtgctggctcggcgagctcttcatcgcggcgttgttgacggtgatgaagacactggaagaatgcggggctcaggtcagcctcgcgactttggattgggagggaaaagggttgcgggacttgcagtgctgttccgagactgccgaggaagaaacccggcatgacaagcggccagtagtcgccctcgctctcgccccagacgagcaggagcgagccaatgcaagcgaggatcgagccgccgaccatccggatcttgagcgacggccaggatgggaagaagatgacgaggaggaagacggcgccgccgccgaccgagatggggaggctggcggcagagcgggagggagcgagtcagtcgctggcaagcccttgcttgagcaacgaaagcacgacgcacaagtggacggccgtcatgattgagttgacgccccactcggcgaggatgttggcgtagttgaactggacggctgggaacaagtagtgcagaagctagacggtcagcatcgggtgtgcgtacaccaagagagccggcacgacgcaccgtaccaccatgcgtacggcgtcagggcgacgagcatgagcggtgtgacgttcttgatcttccagatggcgggcgtgatgagcgcgttgaccgggtcgatccgcgtctcgtaccagaagaagagcgggaagaggatgacgccgatggcgagcgtaacgatcggctgcggccggagcctagagggcggagagcgaggggtcagcaccctacgacctttcgaagagtcagatgacgcagggacgtaccagccgccgccctcggacccatcggtcaggccaaagatcgtcaacaccatggctcccaggaggaggaaggtgccgacatagtcgaacgcggtcgggtgcggcaagctctcgagctcggcaaggagcgcgaccgaccgcttgtcacccgactcggcgtcgaagcggagcgtgtcgtagtgcatctgcttgagatccttgtccgaagggatgcagaagacgcaggcgacggcgagggggatgcaaactgccgagagtggagatggtgaggcgtcagcctctctgaccaacaatgtgaccggctacaacgacgtacctggagcgagcagccagaagatccactcccaagaggcgagctgaggcagacaaagggatcagggcagtcagcaccaggcgtatcgcgggacgaggaggtcggccgaacacgcaccagcaggacgccgccaaggatgaagcccgcgacgttggcaacctcgccgctcgcgccaaagaccgagagcgcaaagtgctcgtcgtcggccctcgggaacatgtggacgatcagatggagggccgacgggatgcaggcggcggcgccgatgcctttgaccgcgcggaggacaaagaacgtgaccttgtcctcgcagaagccgatgccgaggccgaagataccgacccaggcgctgcggcgaggaaggccgagagtagggacgtcagtgtagcgttcgtcaggacgttgttgccagcttggcaagggacgactcacaggccgccgatgaagacgtatttggccgaccagaggtccgagaccttgccggcggcgagcatgaacgaggcgaggcaaatgacataggcgttgatcgtccatgtgctttcgttggcgctcatgtcgaggtgggcggcgatctggcggtccgagaggaggagaaggaggtcgaggaaggccgttggcgccgagggtcagcagcagccagcgaagcgtcatggcatcggcgggacgcacgtcggggatgccgagaacgacggcgcttgcactgtagacatcgacgaactgagcgatgcagctggaagggagaaggagcacagagtcagcgcatgtcgcggggcaaaggggaggaggagccacaagccttggcgctgtgcggccaggcacatgcgagcactcacaagacgccgagcaggaagcctcgccggacgcgcgagatggtcagaggcgtgatgtcttctggccgaagcgtcgttgccgcggttgagatcggcgtcagggcggtcatcgcggcggttgaggcgggaggacgactgccgggcggtggtggtcggagggaggtgagagaggtggtggagcgcgcgcgcgagcggaggaggcggaggaggagcgagaagcccaagctgagtggtcagtcggctgaaggtcgtggcgtgtgccgtgggtcgtcgtcctagtgagaggactgccctgcctctcttgtaaggcgacggagggctcggagagaaaacggcgacggctggcagggacgcgaaggcgaaggaggagccccgggacgtcgctaccgaggcagcagggctcgccgagccgcgcatgcagcattaatggccgacggacgttccctcgccctcgcggacaactgacgaccatggtctatcgacaggatacgactggcatggatccggtacgacctttgagcaatgagagaaggccgtcccgagagaaggtgagcagtgccgaagcgggagccgcacgaagcggagaggcggagtcatcggttaagagcaggatcctcagctcacggcacaacgaccgacgcctgtttcagcgagtactctatactcagagcagccctctatggccttgtgtcgccgttcagaatgcgaggtagcgacgtcgagagctggaggcgacggcgccgtctgctcgggctgactgctgctgcgcggcccaccgaccgctcgagctcgacatggccggctaacccttgaagacctcagagggtccggttctggaccagttcgactgtgagatctcaagcatggtgtaaagcagcagtagccatgacgggctcgacgtctgtgctttatcgcctgccagtgcgcctcggtgagctcgtccgcgtgtcggcgcgcaagccatcggggccgagctcctggccctgctgctcccgtctgccaacgtcgaccctcgctcgccttacccttggcctctgtggcagcgtcctcgagctcgccagccttctctctctctctcttcctttgaaaaagagatcgcaccatcgtacctccgtcgccggatggacaccttcggcagctcgacctcgacctcggaggtcctccggccgacgacggctccctctcccgatggcctccagctcggccagacaagcattcgcccgagcaaagcaccaaagacgaggagtcggactggatgcctgacatgtcggaagcgtgcgtcctgggtcttgctgctgtcctgcttgcctgcgagcggcttcctggagcggaggagtaactcgccagctcaccccttcggcccgaccgcccgagccttccttcccgactcgacgatctgacgcccatctctgactgtcttcctcacctcaggaaagcacaagtgcggcgaggagcgaatcggttcgccttcgcgccagagctgcgagcgctgcctcgccgccggcctcaactgcgtttggccgacgatcgaccagctgccgaagggccgcacccggaagccgacgcgccagccgacctgcgagcgagacgcaacagcctcgcttcccgtcgctccgctctcgagcgccggggcttcgtccgaactgcagcagtcgaccttcttcccgctacaggtcgcagacctcgctgcgcatgcgccgttgctcttccacccgacgtctgcccagtcggccttcagcccggctgcgctctcgggcgccaacacggctcatgactggtcctccttcaacgccgtcgctggcccatcaacctgcgcctcgatctctacccaggaaaacttcttcctcggtggaatacaagcgccggaaggaaacgtcgtggccgcgacgccgacgcacaactggcagctcaggctgcccgaggacgcatcatctgctgccgccggcctgacgctcgaagcgttcggcctcggcaacggctcgaacggcttcggtccgatgtcgcccggctcagcctggctcgaggacgtctcctcccctgttctcgacctcactggcgggcttaccccgccggcatgcctgcctccagaaccaccgcagtcaacctatgatgcatgtgacgggagagcagggccggtcgtggcagcgtttgacggccgaggagccgacggctggctcatgaacccgccgcgcttcgtcgcgccgacgccgacgctcgagctgctctatcggaatccggaggagcgggcgctcgtcagtcgatggttgaacattgcgcatctctggcctgctcgaccgtcgctgacctcaattcgcgctcgctttctgacaattcgcagatccagttcttccttgtctcgatcccgtacgccgactgtcatcaagcctcgtctgcgaagcaaaggcgtctgggctgacgttcatgcccgcctacccgcagcatcatctttatcgggcgaccccaagcgccgcgcggtaccattatccctccgccttcgcttctgccagaccggccgccggatctccgctccctcccgcgcttcgacatgcttctgccctattttgacatcccccactttttgtcgctcccgcgcggctcgagcatggcgactgacgccctcgcgctcgccgtgatgagcatgtcggccattcatctcgcgcacctccactggacgaacggcctcgaggcgctccggaacggcgaccacgccgcggcggcgcgtgcagcggcaagcgagaagaagtaccgtgccattggccggagctttgtctcgacctctttgtcgctcgtccggtcgtcgatcgacctgtttggatcggctgccgacctcgcccagctcggcctccgtgactcgtcagcgccgacggaggcgatcgaggacacggacgatatgacgcggctgctcgtcgcgtgctcgttcgccgttctgaccgactgcatctcgggcggatcatcccacctgaccgccctgtcgatggcgaaggaggtcgtcgacagtcggggtggcgcccgcttgatgctcgcctcgatggccgcctcgatctcgtcatctcgagcctcgccgctctccgccactcgccggcgccggctccggcttctccgctcggttctcgaagagtgggtcgcgcgttcgctttgcttctattcctcactgaccgggtttgattgctataggctggtctcctgggagctcgtcaccactctctcgaccggaacggcgcccaacctcttcgcgacgactcagctgcaaccctctgagccgggcgacggcttcaacagcgaggaccaaccagcaattgagaccctgaaagactggttcttcgccttcagccccccgagcggctcgcgcgacacggccggcgtcgattgggagacggtcgaaacctgctggggctcgagccggatcgtcatgttcctctttgcgagggtcaatacgatctgcgctgctgcccgggccgctcaggtcgttgacgctttgaccctcgcctcggcaacggccgtgctcgtcgagattggcgtccgcaaggccgacctcttgcgcgccttcccagaactgttgcgctcgcccttcccaccgcctgacattcctgtcacgaccaccgcggtcaacgactttgagaagcacatcaagtacggcaagctcggtgctgggtcggacggcccaaaccaagacggctccaacagcttctttgaacctcgacgagctcgacgactcgaattcggtgacatgctttggtgttccacttttgaagtatgcctgctctcccttgtcgctatcgggtgacgtgccgctgacgcctgttcgctcgtttcttccttagatcctgcttcgcgtcgacgcccagggcgaggcgaccgactcgcctgtcatccggagccttgcgttgcgcatcctcgagctcgtcatcgagtcgcacgcgaggaagcatgtccaggtcggctacggctggccgatcatcattgccggcgccatgctggatgacgagcccagccggcagaaggtccggaccgccatgtccttcatctcggcctactgcttatttgagagcgtcaaagcgagcgccgtcatcgaggatgtgcgtgtccctgtcattcccgccgaatcaggagcttcggcttaccatcgagtttctgttcgcacccagctttgggccctgcgcgacagtggcgaccggacgatgagctggcgcgacctcgctgcacgcgacggcggcttcgcttttgcgtgagcgcagatctgccatgcttttggtgctcatgtttgacggcgtaatcgactttgatgggatcacaggggcatggatgtcgcacaagaggcaggacagggccggcaatcaccatcactcgctgtcgggaacttggctggcgaacggtttggcgcggttccgtctgagccagacgcctcagcctcggcagctgcctttgaggtgctggagccagaaacattggtcgtcagcgcccgagagcggaccgagaggagaacgagccgaaaaggaactgacgcgttcttgcgccgtgtctcgcgcatcttctccttccgcttgtcgagcttctggatgtgcgcagagtgaccagactcgccgccgtgcgagcgcagtgcgagggcctgcagtgttgagaggctgccgtaacgccagtttgctagcgtcagctgaaattgctgcgagactgctcccatggctcaaatgcgcaccggtaggctccgcgtcttgggattgtccagtctgatggctcctcgcgctcgacgagtggcacagacagtagctctcgatctgcgggaaaaagcagtgcggatcagggaaagcttccatcaagggctgagcacctgtcgtcactaaccgttgacccggaagaagcgaccctcgcgacaaagtatcacagcggcgttgtcgctcgtcagcccgccgagcacaggcagagcaggtcacatgagctacagcgatgatgaacgcacaagtcatcttcaggagaggcttgtcgacgagttccgcgaccagggtgctgagaggcacgaaccggtcagcacgaccagcccgtttggctttgcagcggagagccactcaccgccattgcgacggccacgcgtcccagggctcttctggctcattgtcgtgctcctcatcgtaacttttgcggaccgcagagaagctgggcaaggagtgaggcgtcagcgatcatcgtctgccggggctcacgcaatatgctcaagggaccgacgcatcgacagccgacgggctatgatttttcaatgaagtgttaaatcagtcagtctgtcgcaacaaggactccagagtcgagaaggggcgagatacgtacgagatgtcgccctcccgaggctggtcgaagaccggctgcgcataaatgttgggatagacgcagacaagtccacgcgtccagtcgtgcaaccgatgcagcttcggatcagcaacgacggccgctttagtcgcctcccagagtgcgtcgcgcttcctttgtccctcgtgtccagcgctccattcggcttttgtaatgccccaacggctggcgccgggagcaccttgaaggccggacgtaaagatgtgtcgcgcaggcgcccagctccgtccgaacgggccgttccgcgtctgaaccttcacgtccgggtgtaggtaggaagcagggttcagagggcctggctcctcattgagtccggcgagtgaggtaggttaacccggatccgctctgctggccggtcgacccagtcggggcagcgtgagtaagacagaacctgatggattggtaaaacaattgtcagcccgtgtctttccgacggcactagtctccggcggcagggcgcacttgccagacaaggtcagtgtagcacgaacggaagaagcgcgacgtggccgacagtgcgaggtggtcgcgaagctgcgaggtcgaccaagcccggtcagcgtcattatacctgagatggaagagccagccatctggagacgtacgtcgaggtcggcgtcgatgctgatgatatggtcgaggatctcgatcgggaagaggttgaacgagacggtgctcgactctgcgagctcgcgccagctgacgacctgatggcgcgccgaaagtacgcgtcagatgaagccctcacaagaagcgcaggacaccaggggccttaccttcttcttgagcgtcggcttggccttcttcacctgcttggtcttcttcacggccgggcgctcgtcctcgctgctctcgtcggcttggggcgatggcgatccgtcacgcgacacctcggactcgtcggcatgacgcttagactttcccttgcttccaccaagggtcttgccggcggagtctgggaaggagtgaaacaagggcaagatcagcatctccagtgtgaggcaagaccgcgcagtaagggggttcggacgcacccgacacggccagggtctctccggcagcagcacggacgtccttgtgcaccttctcctgacctgagctcgcaaagagaagtcacagcagggcggcaagagtacgttagcctcgtgcaagctgaatgtcgaccgaagcgcaagagggcgcaacctaccttcgtcgtcggccttgcgcttggaccccgggccgacccagcgcgtcgtcctcgagctgccggcgagaggcccagcttccatcgcctcggaagctggagcgaacaggaggaaggcaaaatatcagaagtcgtatgtgggtagctgagcaacgtccaacgggacggactgctcgcagtggagctctctgctgccgtctggtcgccggcctcgagctggccggcttgctcgaactccgccggtgccgttgccggcggcggctccggcctggcggccgtcgatcgttcagccgatgctgtcaagcgtcgtgtcgagcgtcgcatggcagatatcggtttggagacagagagagagagagagacgagatggtggtcaagaggagctcgaggtcggccgggcgctctcctcttgcgcctgcgcgggcgggcgtgcgtacgtcgtccggtgcacatttctcaaccaccgcccttcctcgccgaatcgataggtctcgcgctagggcgtcataccattcactgccgccttcggggccttcaaatcctccggcccgcagagctcgtcgacgtgcaggatcttgcggccgtcgtttgagccgccccgcttgtcggcaccgaggtcgcctgcccggctgtcgaacgagaagcgggcttgcagactcggcgagatggtgcgatcgaagcagcctcgaaagagagaggcaaggatcggcgtgaatttgaaggcgtggccggaacctccggtgaagaaaaagaggttcgagaggttgggatggggtgcgcagaggaagtcggcgtttggcgtctcgcagtacctgcagaaaggaggttgtaaggtcagcggtctctttgatcagcgacgaacgagcgcggccgacgcaccagcaaaggcgagtcgacacaaagtccttctcggccaaccgaggaaagtacatgccggctgcgttgcgcagattggcgaccatcgctttcgggatcgcgtgatcgctactagccccaggggtcgaaacggtccgagggaccgacgtgccattgcggtcgacgtccggagcgatatagccaactgaaaggcgcgatggcagtcagcaacaaatcctggggctagccaggtgggccgacgcacgatggtggatggccgtcttgatgatcccgccgccctccgcttccgacccgggcgtcggtggaaatgtgtacgagccctcggcgaaatctgcaatgatcggcatgcggtcgtggatctcgcgatccttcccgctcagccgccacttgccgaccgactggccgctcgctgtcaggagggacgagatgccaagtgagggcaggtggaagagggacggcgtcctgtcgaggttcaagaaggcgcgagccgcgagcagtcagccagccgatgtacagagttcgatatgcaaggatggagacgcaccaggagccggtggcgaccacgacgagatcggcctcgataatctcgccgttgataagtcggacgcccttgacgtcgcttccatcgataaccagctccgcgacctccttgccgccctcgatcgtcccgccgagcgtcttgaccttcttgtgcaggatccggacagctcgctcagcctcggcccagccaccaaactcgttgtagtagccggtccgattctcgaagtctgagacgtgctcgccgagcccttggtcgatgaagtgctgacggattgactcgggcgtcggcagcatcttggccgtcagcgagagccgattgagattgtcggtgcaggcagttatccatgaggtgtcttgatcggccgacccgaccaccaagacgccctgttcgagaagggcgcatcagggacgggccggcttgcgcgcttcgctgagctcaggaggtttgactcgcattctcgtgatagcagccctcccattctggcttgcgccactcgaggatggcgtcgtaagacagctgagccatctcaaagtcgatctgtcgaggacgagccagggagtagggcgagagcggtatggagcagcgtcagctgtgtttgttggccggctgcgcctcaagacgagcacgagggacaaacgtagtctccagctcggaggactttgttgaggtcggtcgacgcagcgtccacggcaggctgctcgacggcctagcgaagaatcacgtagtgcagaagagccggtcatgtcagccgctcgtctagctgatgagggtggccgtttcgcccgccaagaggcaggcgtcatcgaccctgagcagctgagctggcgggcggccgaaggctctcagtgacggcggcattcgtgcctgctgacagatagccttgcgctgcacgactgagctccaggctgctcggcaacgagagaactcactcggtcaatgactcggacgctgtagccgtcttgctcgagaaatgcgaccgcggccgacgagccgaagacgccgctgccgcaaacgaggaccgatttggtgggcgacatgctgatgttcgctgagctgctgatgtctgtgctgccccgatcttgctggacaaaagtcagcgagagaatcgatggtggttcgagaggcgaaaagcaggcgttggaaggacgacggagaggagttcggccgacgccgagagcgagcatggcgtgcgagcccttccgatgcgccgacatgcttctccgtcccctcccctcccacttggccagctctgatggcatgaaaagatgctggctgccagcgtacgagcccgcgagctgcctgtgctgccttctcgccgatcctgtcggtcttcctaggctgatcgtcctgtcgtcggctcaccgggcctgaaacgccggcacgtcggcgccgacgttcgacgacgagccgccggcaccgacggtcgcccttcgtcgctcttgacgatcatctccttctgacttttccgagctcctcagtcgcactccgacatatcctgcgcaagatggtgaagcatatgctcgagttcgacgccatcctctttgacatggtgagctcggactcctcgcccctgccccaccgtcgcgctcgtcacaaactttcccggcatgtccggcgtgactgactcggctttgcgcccctcaggatggcacgctgctcgactcaacgccggtcgtcaatgcagcttggtcggcggtcgctgcgaagtacgggttcgacgccgaggcgctgctcgctagtcagtctgcagtcagctggctttcggcgccgctcgtgtaatgacgtgccgtcttctcttgattccgcagaggctcatggcgtgcagacacacatgacgctccgcaagtggctgcccgagatggacgaggcgactttgtccgtctcccatgccagcccgcccttccgagtctcccttgtgctaaccctctgcctctcgggtgctgcgcctcccctttgcaggaaggctgaggtccagcgctttgagctcggcatcatcgacgtcgcacgtgacctgatggcgagcggcaaggagtctcttgtcgtcttgccgggtgtgacccgtctgctcgacgagctgcgggcagccgctgcgcagggtgacgggccagagcgcatggccatcgtcacgtcggcctcgaaagcttgtgcgtgccattttgggactcctcgtgaggcttgttcgcacttgagctaaccctggcctcagcacgacagacgctcttgctgcgatggacatgctgagcgatggcatcggccggctaccgaacgtggtcgtcacatctgagtacgtcggtcggctacctgctgccaactaccatcggctgacttgcgcatgcctcgcctcattgcagtgacctgtcgaagggcaagccgaatcctgatccgtaccttgagggagcccggaggctgggcttcgaccctgcgcgctgtgcgtactcttccgcgcactcagccctcgctgagctgaccgtgtgccgcctaccttgacttgccttcgataggccttgtcatcgaggatgcgccggcagggtcaatctcgggtcttgccgccagttgccaggttctgggcgtggggacaggccatgacagcgccgcgctaagagaggttcgttgtattcttgacctcaacttccttggcaagcgatgaagctaatatgctgttgcctcctgcagacgcagccgaccttctatgtcgaagacttgacctcgtgcgtatgtcgcactagtcgaggcgagagggaggccatcggctgacccctctgctcccctcccttgtgcgcagcgtgtcggccaagctcgtagacgggaagctactcgtgaccatagaagagcaggactagattaggcattgccgatagaggagtctttaggtctgtcactaggtcttgtcgtcagctgttagtgcattctggaccctcctctgcgcccttagctcatgcatcgacagctgctgccaccgtccttcgcaagcgacatgtcatctcagctcgacgacagtccagccgcttgcccgcaaggctgcgaccgcctctccaacctgctggatcttgacaaggatgtaatctgtgtcaactatagggcgcaagaaggagcgagtgagggagcaggcgagagagaaggagagggtcagctctggaaggctctgcaagggatagagcacccaggcgtggccctcaacagctagacatgcccactcacaggtactgattgccatgagcgagacattgcgggcagcgaggtcgcccgacagcctgctcatgacgccgaccgcgctgaactcgaacgggccggcgacccggatgatgcgccagggcccgtcgaggccgaccgtgccctcggcttgggtgctcgtcgccggcccgtgaaagggcaggatcttggtaactgaaggcgcatcccagacgaccgagagctcgtaccgcgtcttgctaacggtcaggaacgagccggcgtgctgggggtcggagaagagcgccggcggcagctgagtgtgcggcgggaaccgggcgatccaggcctcggatggcaggaggcggagctggagcgtcggatgcgagaggtcgagcatgatttcggaggtggatccgagggttagggaagggagcgggtgagggagttaggggagtcgacgcgtcttctgtcgtggttcggagggaggttcagccgtcgcgagcgcgtccgggggacgccgaggcgcgtcgaacccgggttgacgtcgtgttctccgccagctcaggccctgtaagaagtccctgttcccccccattgctgagccttaagttgctagtaggcggtcccggactatgctacgcgaccgcctgtcgctgacggttcggatcgagactcgaggcggcggcttcgacgagcgaggaagagggtcgaccgcgggcggcagtggtcgcagtcgatctgccactgtagaggagatcgcgagccgtgctcttttcattcgcaggcagggagagggagacatggcctgtccaatggagggagaacaggtcatctcagagaccgccagagacgggggtgcgacggcttgtcagaccgaggtctcgccggccggctcctcgaagtcccactcttcccgccaggcgacgccgtctccatcgatgaaggcgaggccgacctcccggagcgctctcgccctccgcgtaatggcgactgcctttcgccgtcgttgaaagctacaactgggagggaggggaacgaagacggagaagatcgaccaggcgctgtaatgatcagcgtggacagcagggaaaagcggcctggatggtctctgatgatgtcgcagagatggccgacgacggtcccggtctcggtctgccgagtaaacggcgaccaggaaggagtggtggttaggagtgagggcggacgagctcgggccgcgcagcagaagacgcggcttgacgtcgatctcgggttgacgtcgatctcgggttgacgtcgtgtcgaacgccagtttgcagagcctcaaagcttgataggtctctgaccaagtatctgcacaggatcgctttcgactgggctgagcgctggctttcgaccggcagaatggagtccgttcaaaggatcattctactcgaggcgagcagtgttgacgcccgagaacttggccgtcaggaggtccttaccctcctcgaccatcgcacggccaaactcgggcaggacaaaggcggccgagtggaccttcgagttgtagtagcggcagccggggacctccccgtcgccgacgctcgagcccccttccctccgccgccgccgccgccaaccgacccttcatctctctcgtcgccggtctcctcctcctcctctcatcatgcagcaccctcacgccatgccgctctcgccgtacgcgctcgcccctccgcctcagtactcggactacgccggccagttcgccttctcgcccatgtcttacggctcggcaacgcctggcccttcgtgcgcctcgccctcgggctcgagctcgactggcgctctcaagcaccgcatcaacctcgcctgcgcttactgccgccgcaggtgcgttctcatctcttctcctcctcctccttcctcccttgactccgccccgcgggctggccggccgagcgcacgcgcgctccttctccgccaccaattatccacggccagctacccacaccacctcatctgcttgtgcccgccgagcccgaatgcagcgtagcgaagctgacgagcgaacaaccctattcttgagcaggaagatcaggtgcagcggccaggcaaactgtgccaattgtgtccgcactggccgtcaggttcgtgtggcccctctatgacgtgtcaaggccagagtcgacactgacgttttctctccgtctcatttcttgcttgcttgctatctcgcagtgcatctacgaacaggtctctgaggagcagaaccgggcgaccaaggagcgcaaggccgcgctcaagagcctcaagatccagacgctccaggcccacgccgtcgaccccgcctcgcacgtcgtcggccagcagtcggcctcgcccagggctcgtggccacctccggacgacgtcgatgccctacgtcccctcgcggctctcgccggctgctcccatccagggctggtccccggaggttcctcaggtgcgcctcgaacgacctctcaatagcctcgacttgacgactgactcactttctctttgtcctgcagtgggagtctttcgcccctctgccctcgtcggccggcctgtcttcgcggcctttcccctcggtcctgaccggcacctcggtccacgcggcctacattgccaactctggccgtgcctcgcccgccgagcgccagacgtactcgaccgcggtcgagcaatcgatgacgaccgacacggccacgaccccgccccggagccggtcgccttcgccggccaaccactttgacgccccgctcgccgccgcctacagccgggtcgcgcctccctcggccggctacacgagctacttcccgcagacgccctactcgccgaccgacagcctctcggctagcagcgccttcaccgaaacctcgccgcctacgccctttacgcccttcgagccctcgttccgggccgcacacgacaagatggcccacgccgccggcttcccggcccagtactcgcactttggcatccagatcgcgacgccttcgcacccggcctacgactcgccgcaggacgaccggtcgttctacatcccgtcctcgccgacgcgcaagccccggcaccacctcacgcatcgggcgactcagtcgcttggcaaccccggcctcggcttcgctcttcccgatggcttcgcgcccggtatgcccgtcgacccggcctacgagagcacggtcggccacctctccaactgccagatcggcgccggccactcgtacgacgccggccaccaggaggaggaggttacctacagctggggcatgtaatcagcctcgcctcggaccatcctcatgcttatatctcgtacactcttatttcacacccgctcgcacctcgctcccctctgctttcttctgtagctgcacactgtttccttttcttcctctagggcctttcggacaaagacattgctggttcaatctcgtctctgctctctatattgcctgctgcgcacctgttccttcgcaccttcgtcatctgtttgaccatgcttcttcgttatctccttcgaccttgccctgagggaacgaaagtgcgagcttccttcttgacgctggcgagaagaagcaaggcttgctgcttgcctgctgcgggcgccggctcggccgacgccgccgactcgacctcggcgtcgcacctgctccttgatcccgaactcccacttccggaccacactttcctcgcattccaatgctggcctctctcagctcgtcgcagctctggctactgctcctgctgccgtctctcctaccgacacttgctgtcgcctcgctcggagatcgaatctatggcggcggcaagaccgggccgaccactgccttcgccccgatccaccgccatctggctggcttactcgggccatccgtcttcgagacgacgcctgagctcgcgaacgctctcttcgatgccggcggttccgctgtcgctttaggcaggcgtcagctcaagtcgaccaggcggacgatcgagcggccgaggaagcggcctatcggtcagccggacgctgcgcctcccaccgaagccccctctcaggtcgtcctcggcgcctcgttcttaactagcggcgccccccagctggatcgtgtggaatccgctcgggaggctgcggcagctgctggcggcggatgggaggaggtcgaggtgaacgcgcctgacctggacgacatgccgacggtcgtcgagctcgtgcgttgcctcttacccatcgaacgcatgttgcgagtttagtacgcgccgggctgacaatctaggctcgaccttctcactatttgtcaggccaggatggcgaacgatgcctatgcgcttcccggccagccgcgctggatggagctcgaccgcttccacctgacgatcccgttcggctgggaggacgaggcggccggtctccgaggccacctgtttgcgagcgccgacaatgcgacgctcgtactctcgattaaagggacatcgatcgacggtccgctcccgcccaagggccggtcgaccgcccggctcgaccagctcaacgacaacctcttcttctcgtgctgctgcgggacgctcccgaccgacgtctgctcgtgcaaggcgccgtttggcggtccgctcggccggaagcgcaaaacatgcgacgaaggctgcctgaccgaggtgctcttcgggcccgaatcgtattaccccgaggcggtcggcctcctcgcccaggtccggatgcgctacccttcggccgacatctggctcgtcggccactcgctcggcggcgtcgtcgccggtctcctcggcctcacctttggtcttccggctgtcacgtttgaggctccacctgacgcgctcgtcgtccgccgcctcgggcttcgggtgcctcgcgccgaggccaacccagttacgcacgtgtttcacacgggcgacatgattgcgacgggctcgtgccgcggcccgctctcggcctgcggccggggtggctactcgatggagtcaagctgcaaacagggcagcctccgcgtctatgacaccgtcggcaagtggggctggtcggtcgaccggaccggccggagtcatacgatccagtgggtcatcggtgcgtctttgtctacttcgcttcgtcgccgtgcgattagcactctctagcgtcagacggctgacgctgggtgtttccttgccgtgcgcttttcagacaacgtctactcgaagccctggaataacggcgagatcgaaggaccggaaggccgcggccgagactggacgtgcgtatcactcctccgctgcgtcctgccccgctatgactcccattgtgcctccgagctgaccccccttctctcccttgcgagcagggacgtgcctcgctcgacggtcgagagcaaagactgcgtcgactgcgctggctggaagttcatttgagcgtgcttcgctccaggccgttgccccacgcctctggctctctgctttccgttcctcaccgccttgttgtctccatcttgctgcttcgccttgctcgctgttttcgtcgcgcctttgcatgttgttcactcttctcaagcaccaccgatgagctcgttacagcatcaattgagaccaagaagaaagaacgcccatcccgatgcccggcacgaccgccaaggcccctgctcagacgtcttcgccgagcatgaccttcttccgctcggcctttggcttgtcctttccagccttggtgtgccgccggcggttctcctccttggccttgcgcgcgtcgagcatctcgcgcttgagcttgccggcgttgtgaatcgaggcggggatatggcgccggctgagacacggatgagagtagggggtaagagtcagcgacggacccggcagaatcagcgatcgcggcgagcgcgcttcgctcgggggacgtacgcctcgatccgacggacgctcgacgtcttgccccacttctcagcgagcttggcccggtactcgcggcttgctcgctcgcgcgagtcgatgacgccgagcgaggcggacgcctgagacttccacagccggacgttgccgtcgtccgaggccgacatgatgaacgttgacgtcggcgtgtaggagacgtcggtgacactgtcaaggcagagaaggcacgaggcgcaaacaagtcagtcgccaacgaaagacgcacgacctctcgtcaaccgagtacgcaccgctgcatccgcttcgtgtggtagacgtcgcggctgcggccctcgtcacgcttccagatgcggacgcttcggtcccagccgccactgacaaactcctcgccggtcgggctccactcgcacgaggtgacggcggcgacgtggtccttgaagatctgagtcggcgttgccagctggcggatgtcaaacgtgtagaggttgtggtcctcggacgcgagcaggaggacagtcggcagcgtcgggttccacgagagcgcgttcgatttcatctgatgaggcaggcgcgcgcagagaagagggtcagccatgggcgtccggcagcagcgcgaggaaggcgttgaaaccgaccgtcattcggatccggcgctcagccttgccggtccggacgtcgtacaggcacatggttcggtcggtgccaacgctcgcgagcacgctctcctccgactggttgaagcggacacagctgacgttctcagccgtgccagcgaaacggagggtggagagcggggcagagcgtgactcgtcccagatctggacgtgggacgaggccgtcgcgaactgtggctgcgagcggtggtgcgagatcgaggcgaaggggctcttgccagagtaggtgaagagcggtagggccgccgacgagaaggcctcgcgctcgtcgagcggccggccgctgctgctcccgctcggaccggccgtgggctcgtcatcgtcctccagcaggtcgtccatcgccgagcggccgacgaacgacgagacgtcgtcgtaggcggcgccggtccgagccgtcgatggcgacgcccagattttgacggtcgcgtcccggccgcacgagatgagcctgcgctcctcgccccggttatcggccgagaagcagaggcccgtcacctggccgcggtgggcgttggggatcttgacgagcggccggcgagcagagagcgagtgaaggatgacctcgccgtcgccgccgccaccggcgacgacgtcggtccggcgcgggtccttgccgagcgtgtagacgccatcggtgtggccttcgagcgcgccgacgaacggcttggcaaagatgcgcgagatcttggcggcagtgatggcccgggtgtactcgcgctgctgcgagaacgggtgcagtgccgggtcgaggttgcggtgcgtcggggcggcggcaccggccgtcgacggcaggtgcgtgtcgagcgagcgcgagatgaccgagattttctgcaggccggagggacaggtcagtctgtggacgtacaatatagctcagcctgccagcagctccgagggacggaccatggcgaaggcagaggtcgtggtacagaggagctcgagctcgagccgcctcgtccgcctggcaggactgcgcctcctcgcacacgcgcgcgccggccaaattctggctcagtcatgattaggtcagcatcaagatcaaacactctccctcgattgcgaagccggccagagtcgagcgcccgtcgcccgtcatcatcttcaaccgcccatcaaccacgaccttcctctcgctcgctctcccttcctactcgcagtcccgcctgctcttcacagccccatggccgtcgctcccggccgtccggcggcaagcagtgccccgcaggcgccagtcattccggcctggctcgcccacccgaccgaccagcgcaagctcgcgctcgccctcttcgtcgccctccaggcctggaaggtcgccgcctgcctcgccccttcggccgggccgatgaccgtcgctcgctgggcgctcgtggatatcgcgtttgtaatcggcgtcggggccctgcgcatcccgcgcctgagctggagctggtccggccgggcgctgctcaccggcgtcctcgtcggcgtcgtcgactggctcgtgctcgccggcggctggcggtcggtgcgtgccgctcagactcccatcagcctcgtacctgctcgcgccgagctgacgagctaactgtctgccgcgctcagattccctactcagctctcctcccggcaagcgtcgctcaggcgctgacgttctacccaacgctgtcgagctcgcatgcccggttgtcagacgtcctcaagccaaaggagcacttgagcggcgccttcgagcttgtcattacgcccttctcgtgagtctcgtctctctcggcagcgtcctggcaggagcgacgcccttcatctggagtgttctgacgcgcgtcccttccctcgcgcctgccagcacggcccgcattctgccccagacggcgcctctgccctgcatctcggatcggaccaagaaggtcccgctcgcgcttcacttctcgacgatgccgggcacgattgagtacgcgctgacgcttccggccagccaaggcggcgagacggtcctgttcaacgtgagcgcgagcgcgctcgacgaggtcaagccccgacgaagtctcgaggaggccgaggcgctgggcgcggctgaggatgatgacgatgaggacgaggccgaggtggaggctctccttgccgtccggcagggtgtcgccgctcggcaggctctcaccctcgccggcgactcgtcggctgccgccaaggagactgcctcgaagggcgtgacgctcctcctgccggttgaccggccttcgagcgtccgtctctcgcgcgtcttcccgcccgcgcacggcagctcagcaggcggacaccactcgttccgggtcccgctcgccggcaacgctccggtccggatctaccgctgcccgtcagtctcactcatcccgcagctgcccggcggcggcggccggatcgagctcgatatgcacggctcaggccaaggcctcgtcaaagccgctggctcggcgtttgagcggtgcatcggcgagaagggcacggtcgacctcgtcgtccgcggcgagggcggcgtcaccgtcggctggacctcggtcgacggcgccggcaacaaggcttcaggcctgctcgacggtatcggcctcgacgaccccgaggcgaccggcgcggcggccgacaagtcgtacctcgtcccgctgccgctgacgtttgacgtcgccggccgcaagacctactcgctcacgacgctgagctcgccgcacgtgccgcagctggcactcgagggccagtcggtcgtctacactgtcctccctcggccggccgtctcgttcgcgccggcgatgggctgctcggccgaccggccgctcgtcctgctcaacccggctctggtcgcccacccgaagcccgaccacctgacggtcctctcggagcccaagacgccgcttgccggtcatccattccgctcgacactctccttcacgccggcagccgacaatggtgagcgggccgagctggtgctcgagctcgctcggaatctcggccagacctcggtccgcatcgacgagcgcggcgagggtctctggcggatcgagagcgtcgccgtcgacggcgccgacggccgctgcgggggtgacgttaaggagccgcgcgagtgccgcatcgtctacgcgcctgcgccaaagctcgtccgctacgacatccgcaaggtcgaggacgattgcgccggcgagcaaggcgtcaccgtctcgtttgtccttctaggccaagcgcctttcaggctgcgctacaccttgacgacgacgccgttcgcgacggccaagaaccctcacccgcgggccgagacgagccggccgatgtacgagacgctcacgagcaacacgggcgagctgacgctcctgccgaagcaggagggcgagtacgtctacgcgtttgagcagctcgccgaccgacggtacaccgacggcgtcgccatcgagcccgcgaccgtcaacggcagcgtccggccggtcgctgctgccgactttggccttcgcggcgatcggcgcggtcgcgagctccggctctgggcttgtgagggccaacaggttgagcttgacgtcgttatcagcagtggctcgccgccgtttgcgctcgagttcctgacgacgacggcgacaagctcgacggccgagacggtgacgtttgcgacggccggcaagcacgccctgacgctgcccgtgcccgaggcgctcctccggaccggcggcaactactcggtcggcctcgccggcgtccgcgacggtaacggctgcggacgcaagctcaaaaaggacccggtcgcggtcgaggttcgcgtcggccggccgacggccaagattgccggctcgcccgaggagcggctcgccgtcgtgaccgagggcaaggtcgtcagcgtaccgctgcggctgacgggcgacggtgtgagtagctcgtcgtataggaacttcctcttgggcgaggaagtgctgacagacgacattaccccgtctacagccctggtcgatctcgtaccagaagtcgacgctcggcaagccgatcgagctgaaggacatccgtgtcgccaacccagagaccctctttgacgaggcggccgtctacaagctgctctcggtgagtcgtgccgtccccagacgtccttcggtcatcaactgacccagcagcctgcactcgcaggtcgccgacgcccactgcaagggctccatcgtcacaggtcaggagtcgtttgagatccggcacctgccccggccgagcgtcaagcttgaggttcccgagggcgccgtcgccgtgacaaagcgcaaaagctggaagccaaagggcgtctgtcttggtgaggaggaccacgtcgctcttcacttccagggttcgtcttggacccgctcttttgcattctgcctgcttccggctgaccgactgtcttctgcgggtccaccaggtcaggcgccgttcgaggtcggctacacgatccgccggccgagcaagtcgcttgtccacaccgacgtccaccgcgacatcctccgcgccgtggcaagctcgacgacgctcgctctcgagacggacgagcccggacactacacctacagctttgaccgcgttggcgaccgcaactacgggctgtcgtcgatggccggccgggcgctgacatttgaccacgaggtctacggtcggccttcggctcgctggctgtcgacccgccgcatcagcctctgcgcgcactcgaagctgacgccggcgtcgctcagtggcaaggagggcctgctcgccctcaagggaaaagcgcctttcgcggtgacgctccacatcacgacgcccaagtcatcgcagccgttcgtccggaccatcgaggagattccgacggacgagtggcggatcgacctcgacgaccttgagttcagccagctcgggctttacacggtctcggttgagagcgttgccgacgcgagcggttgcgctcaggacctgatgggcgagggcgtcgaggacgccaaggcgttcaaggtcgaagtcgccgagacggccagcatcgtccaggtccagaagggcgaggacgtctgtgtcggccagtcgctcgacttcctcctccaggggacgtcgccgtggagtctgacgtacgtcgccgagcagcgtttgcagcctctagcctgccgctgacgaccgatcttgtttacctcgacctgcaggacgtcgttcgacggaaaggagcggcgcgtcacgcagaaggatggcaagttctcgctccttgcagacaagccgggcgccttcgccatcacctccatctcgcaccagcgcaaccagtgccagacgcccgtcaccgacgtcgtccggcgcgtacatgcgctgcccagcgcacgcgtccgcgctggcgaccgccacgtggagacggtcgaggagggcgagcaggccgagatcgtctttgcatttgagggcgagccgccgttctccttcacctacacgcggtcgacctcgggccgtctgccgacggtgctcgagacgcacgtgagtcgtcctcgtcaagtacaccttgctgccctgaggaaacaacagctgactcgagcgcctcgttcccgctctcgcaacagaccgtctcgggcatcaccggggaattgtactcgatctttgcctcggcggaaggcgtctggcaggtgaccgaggtcgaggaccgctggtgccggtgcgtctggctcgagcacgttgcaacctaccgtgggctgtcgcgctgaccgcgatcgttccgtctcgtctcgccccaccagcttcccgccgctcgcagccgcgcggccagacgcaaggccggcgtcgctgctcgagggcatcgaggtctttccgccgatacgggtgccttgaggcgtgtccgctccaaacctatagaaatgctcctgtctgaatctcaaggcacgcgcagagggtctcttccggagtccatctagatgctcgaccgttcccgcgcaatcaggctgccaggcgcacatccttctcgcgccgcgccgccagacctttggcggccgacccgcccttgtcgatgacctcaagccctagcccgatgagcgtttcaatctcgttgtccgcccctgcgtgtttctcaagcgagatgtaaggcagcaccaatcgccgcagctggagaaacttgggaggggcaacgtcgtctttggccgcgagggaggcgacgatctgaagggcgtgcgacattggttcgctgacgctagccttgtgtggagttgtcgagcgatcccaatcgaggccgccgctgccgagctcgagtgcattcatcgtcggatgcccgtcgcgaagcagcttggaaaagaactggccgaggcggactcttgagttgatgatcaagccctcgtgaacctcgtgctcgtaattgatggggatgatcatgccaactgagaggagatttgggcaggagacagccagagatggcaagacgtccaagccggtcgcctcggcaatatcgagcacgaggcgaagataccgcaaagacggtccctgtcgttcgatgaaagcggccagctctggctctggctgtaaaccccacatctcgagcttgagagattctaggccgggagacagagatcggagccattgccagggtgcggcgttcacagtttccatcgccaaactgcggagaccagagaggtcgaatgactttgatggcaggtcgaccggccatccctcggacccgtccaaatcgtcaaagcattcaagcgtaagcagacgtggacgaggcgactgcgcgtttacgggtgacgagaagaggtcacgggttgatgtcgtgaggtgctgaaggttgcgaaacgagcgcacgcgccgcgagaaggagccgggttcgtagacccacgctgtcttgacgaggtcggccaggccgacccgattgtcgactgcacggcaccaagcagcgagccgtgcagtagccatctcggcgatctcgtagctgaagccgtcgagggagcaagatagaccgacgtgctcgtacagcagtggaagacagagctcctgcacggggaacgagtgtcagtgcgcgggtattagcggacaggaatggcagatatacttacgtagaagtccctcgagacgagcatgcagttaagcagctgctcctcgatggcccacgaggccggccgagtcatgagccgctcctcctccgcctcccaagggttgagtttgaggcgggccagcgatgcagcgacttgctcgaggatgagctggaggagctcgatggcaaaacgggccatcttgaagtccttagggtgtagagacgggtttgacggcgacctgaacgggtccgagaggtgagtcgtgcgaggacgagattgtccagggttgaggctcgaaaggagggtagactgcgccggtggtccctgcagcacagcaagacgaacgaaagctcgtccgtcgttgttcagctgcaggatgacgacaggcctggaggcactccccgcgggtgtgctcggcagttcttcttagctcttgtaaaggcagtcgtgacgaggagacgtcggatcagggtcgctgtcggtgaggcgctagcagcgccgacgtcgaccttctctctcctcctctcctccatctaatcagccggctcgctttgcctatcctcacaagacccaaagcaagcgtaccatgacgcacctatcgacgcccaaggagcttgccgacgcccttgcgcagtttgacacgattttgctggactgcgatggagtgagttgtcggtcgtgccgcaacctcagccgacgtcccggccgttgccgccggcttctggacccggcactgacacttcgtacttggcacaggtcatctggcagggtaacgagctggtgcctgacgtcaaggagaccctccagtacttccgctcgctcggtgcgtcgcttgagccgtcgacgacagagcaagcctgttcacagcagctgacgccgccgccgctcactcgcgtaccttcgcaggcaaggacctcggtcagccctcctctctccggcaagcacttcatgctgctagctaacagcttcagatcctgcacaactccagtcttcgtcagcaacaacgcaaccaagtcgcgcaaacagtacaagaccaagtttgacaagctcgggatcaaggccgccgaggtgcgcagccattcccagccgtgttgcctcgctgcctcgcgcccttttttgcctttcccatccgccttccgctctgaagcgatgctttagagagctggagcggcagcaatcgtctcgatacagtgtcctttgcacttctgcgacggctggccgtgtcgtccctcacgcgctccgtcgcccaggctgtcaagtcgtagctgccgaggcccacctgctgactctcgtcccatctgatggttgcgccttgcaggaggagatctttggctcggcttacgcctcggccgtttacattggccagatcctcaacctgccgaaggacaagaaggtcttcgtcatcggagagtcgggcctcgaggacgagctccgctccgagggcctgaccgtctgcggaggctctgttcgtccagttgctatcagtctcgggcgggcctgtgctgatcgcgggactttctgttgccatctgcaggaccccaagtcgaacgagcctctgccgagccaggactttgccggtatcaaggctgaccctgacgtcggcgccgtcctctgcgggtgcgtcctgtttgacgctggtacgatgaaggggctcgctgatgccggccagcccctagatttgacacctacatcaactaccgcaagctcgcaacggcacacatgtgcatcatgcacaacgacggctgccatttcgtcctgacaaacgaggactcaaccttcccctcgcacggcgccttctaccccggcagcggcgccatctcggccccgctcaagttttcgaccggcaagacgcctatcgtcgtcggtgcgtcgacatcttgcctgacgagtgtcgtcccctgctagccgctcacgcgagactgctcctttgctccaggcaagccgaacaagtcgatgatggactgcatcgtcgccaagtgcggttctgaaccttctcgtcgctctaccgtctcgcactgaccattcgcgcttccttcaggcggcacttcgacgtcaagcggacgctcatggtcggcgaccggctcaacaccgacatcgaggtgagcctcctctgactagcctcgtcgtcccgatcgccggctgatccactcacgcatcgacttctcacttgccctcgctcagttcggaaacacctcgggcacctcgacgctgcttgtcctcacaggcgtcaaccaggtggccgacattgagccgagcgggacgacgccgacgtacgtcgtcgacagcctcggcgccttccgcgtgctcgcagacgagaaggcaagcgcttgagggcggcccggcagcagggccgtgtgtgactcctcctctagaaccggttagacaaggtcgtcctacaagacataggaagagaagcggatcgctcgtagatgcctcatgcttgtacctttgatcaactacggcgatttcgtgcgccagagaggccaaagccagcctgtgatcgcgtcggtcccgaagtgatcaggttgtcgggccgcgtcttccgttctggcaacgaaccgctacgcgacgcaacgcaagaagtagtgagggccccgctgcgacatcttcgcgggccctcgaagccggacgaatgagcggcaggtgcgcatctctcagcatcgccggtaaaggccggacccgacgcagctggctggccctttgccggtcgcgtcgttcgtcctcatcgaagagggacgacgtctttcagtcgcatcagaaggacggcacagcgcctcacgctctttggtagcccttgcacgtccctttgacgtttgctggcccggctatcgacctctattttgagccgacgagtcgtgcgccgcgacccgggcggaggaggtcgcagcgctgcgcagcacgccgcagcgagaagcaaagtcgaggtcggacgagcgtcccttctgccctccttctttcttctcgtttttgattagagacctcacacgaagatgacagcacccctggcctcctgctgtgcacgacccaagtagcctcttgaccagagtgccggcgaaggagacgggcggcctctccttgcggcggtctttctcgatcgctccttctggcggcccggcccgggccggagctcagcgccagcacggccgctaaagccagggctgccgtcgctcgtccgttctttcacccatcaccctctcccaccctctctccttctctctgcacacctctgcaaccatgtctggtgagttctgcctgcgcttgtctgagtttggagctcacggcgcagctctggaaggctcgccggcgcgttccttctctcagcctacggcggacatcggcccggacccgctgctctccctcgcccttcgagcagggctgacagcggtggcctaccatcctcagaccttacgatcaccggctttgtcgtccacgatgtccgtttcccgacgaacgagagcgcggccggcacggacgccatggtgcgttgtcgtcccttcaccccctgttcccgacgctggagacggcctgcgcgcatctcccgcgcgagagctcgctttgcgtccgcttgctgacccctcctcttgtttctccgttgcttgtccatcttacatctgtcatttcaacagaacaccgagtgtgagtctgacatgttcgactcagaagcagcgaaaacgaaggatgagcgagctgacccctcaggcttgctgccgcccctcctcgtccaggcgactactcgtcggcctacatcacccttcagaccgaggaccaggacctcgagggcgccggcatgaccttcaccatcggccgcggaaacgagattgtgcgtcgctgctcctgtcaagctctcacaatcttgagttcgtccctttcggccagccagctgactcgtgtcgaacgactgcgccgcccaggtctgcgacacgatccgcctcattgccgctcgtatcaagggcaagaagatcgaggagctctttgagaacatgggcgccacctggaactacctcgtctcggacccgcagatgcgctggatcggccccgagaagatgagtcgccctccttcgcctgacgctgcgcgcgcagctgcccttgccacgaacgccaggcactgacatgacgacctccttctcaatgtctgctgctcttacggagtcgtccacatcgccactggcgccgtcagcaacgccatctgggacctctactccaagagccgcagcaagccgctctggaagcttatcgccgactttacgcctggtaagttgcgttgggcgcgactcgacctgtctctcgccctagggctgaccgtctgtcgctctccacccttccagaggagtttgtcaaatcggtgacgttccgctacatcacagacttcctcaccccggaggaggcgcttaagatccttaaggacaaggaggccggcaagaaggagcgcgaggcaacgatgatcaagcgcggctacccggcctacacgacgtcggtcggctggctgggatacagcgacgacaaggtccggcagctcaccaaggaggctctcaaccagggcttcaaccacttcaagctcaaggtcggcgccaacgtcgaggacgaccttcggcgcgggcgcgtcatccgcgagatcatcgacgaccccaagaacctgcccgagtggcgcgagaaaatttcgcccgagtcagttgccggcaagaacgcctcggcggccggcaccgtcctcatggttgacgccaaccaagtctgggatgtcgcgcaggccatcgactacgtcaagcagctcaagcccctcaacccttggtccgccctagtcctccgagcacagggcctgccagctcactgacgtcaacccctccctcgccctcaggttcattgaggagccgaccgcgcccgacgacatctccggccacgcccagatccgcaagggcctgaagccgcacggcatcggtgtcgcgaccggcgagcacgcgtgcgtccagcttattcctgagccttcgagcgaaccctgtcactgacgacctcacctcttcttctacttcctcagccacaaccgcatggttttcaagcagctgctccaggccgaggccatcgacgtgtgccagattgactcgtgtcgtctggccggcgtcaacgaggtcctctcggtcctgctcatggccgccaaggcgggcgtccccgtctgcccgcacgccggtggagtcggtctttgcgagatggtcattcatctctcattgatcgactacatctgcgtgagcgggtcgtgcgagcgcaacgttctcgagtgggtcgacgagtgagtgcctgctctttctcttcttgcttatcatttcgcgctggtcttttcgatagagtgctgacgccatcttgccctctcttccttctctcccttctctcctctcttccctatctctccgcttctccttcctcctcctcccctggtactggattgtggttcccttcaggctccacaaccagtacatctggcctgtctccatcaacaaggagggaaggtataacgtgcctatggaccccaaaagtggctactcgatcaccttcaagcccgaggccatcgcccccccgcttggcccccctcagccccttttgcgagtacattgccaactcgcccgacggcaagtcgatcctccccgtctttggcgacctcttcctcaatgagccaatcccgatcggaggccggatcgacgtctcggacgagcctggtttcggtctcatcctcaatcccaaggcccggctcgtccccgccggccggctcttcaacgccgacccagagcgcgggcttggtgaggccgaccaggaggagtagaggagaagacgacggtcattgtaaacgctgaggtgagagcgaccgcgcgtccccggtgcatcatactcactcctgcccttctgattcatgcgctctgtcgatcgtcgccgccctgcaaaaagatagcaagacatgattacgcggacgaaccaagagtaaagagcgaatccgaagagggagagtaagtaatggaaagaatgacaagggcgaccgagatgatgaagacacaggacgggcggaagcgtggtggcagccacggtggcaaggcttcactcgtccatctcctcgtcctcgtcctcgtcctcgtcctcgtccgcgccttcttcttccatgcgcgtctgcatctcgcgccagaagccgccgacttgatcccagcgaatcgtaaactcgccggcgaggaagccgagcttctcgacgaacgacttgtccgtctcgagcgcgaggtcctttgggacgtagtacatgacctcgccggctgcggcaaacgcttgccggatgctgaagctgaggcctgggaggtcaagcgggagggagggcggtcagaggtggagaaggcagagtgaaagagagagaggcggtacgcactgcgctggccggccgtatagacgcagtgccactgggtctcctggccgttgaggagctcgaccttgacgacggtcaggttcgtcaggtcctcgtacatgttgaccttgcgcttctcacgcagcagttcctcggacgaagatgcgtctggggcgtttgccttcgccgaggcggctgccggcgcggacccctgcgctttggcggcggcgatcaggcgctgcgagttggcgacctcggtctgcagctccttgtcgcgctgctcgactgagaggtgagagggcgggttgagttcgatcagcactggcatcctgcaaagcgagcagtcccgtcggactgactcgtcttcagctggtccttgatgacccgtgcttgctcgcggaccgacttctcgagctcctggaccgtcctctcctcgcgcgtcggctgcttgtcgacgacggccgcgagcgggaccgactcggccagcttggccttctcgcgcttgaccttggccagcgccgtcgtcaagctctcgatcagtacgctctgctctgcgaaggccggcaagcagatcagctgctgaagggctaggcgtatgacgacgtggcacagggtacgcactcgtcgcccgctcctccgccttgtgccggtacgagctgaagttcttctcgacctcggtatgcttgaggcgcgagagctcgtcaaactgcttgatgtaggcatctcgctcggccagatagccgtccctctcggccgtcaactggtcaggaaggggcacaccggcgtcagactgctgaccaggcgatgcgctttgcagcaacgcggacgcgacgtacatcagacgtgctccgctcgagctgctgaacggttcgccgcagccgagcaacctcctttgcaagatcgccacttccgccctccatatcgtcgtcttcgtcctcgtcatcctcctcgaccggcacgaccggcttgggcgccggcttccgggccttcgccacgcctgctgcgggagcatccttcttcgttgacgtcgaggcggccgctgacggcttcatcttgaccgccgaagatttgccagcggtctgggcctttggtggtcgacctagtttggctggcgctatggcggatggacagcagtgcgagtgtaagcttccagggcgggagcgagagagcaggccaggccgaggacgcacgagctcggacgacctcctcctcctcgtcggaaccgtcgagcagcgaatcatccgcggccatcaccttcgtcgtcggttgctggtgaagtctacccttcgtatgaggctggagcttgagcgggagggcgtacgagccagagcgagcggtctgtcggacggtgcgcaggagcaggaggagggtcagtcgcgcgcggcgctgcggggcagactgctcgccaacctcgaggaccgacctagtagggtttgggcgagagatggacctgaatgtcgtccgagtcaaagaccatgcaaggtcgatcgctgccagcaagaaggtggagctgtcggagacgagcttgacggggagacgacggttgagggacaaaacagcgctcgagcttcgacctcgagacgcgccgcgcgcatgctttcgccctgcccctcttgtcacccaccccttctcgccgctccctcccgccctctgtaaatttctgaaggaacagcgacgccgtagaggtcagtgaagagctggtgaggtatctgtgaggctacaactcgctgggaggctgacggacgttcttgctgctgcagtcctttaccagcccgccagggccgccgtcgtcctcgatcgcctcgctctcgcctcgcctgccctgccgccggccagctgctcgtgacccagctcgggtgctcgtcggccacccctctcatccaccagacgactcgactgagattccctaggtaccgatggtgcgctcgctacttccttctttcgtcgttgaccaagctcaagggggctgacatcagggcccacccggccttccaccgaagggcgtcagcggcctccgacggctgctcgaggacgtcgtctacgaggccaacctgccgacgatggcctggatgcactgggaggagcaccatcggcccttcagggtcggcatcgattcgaggtccgtccctttggccgagggtgcccgcgctgcttggctgctgctgacaggtctgctcgctccggctcctctcaccttcctgccgccccttcatcaccgctgcgcagcatctggctcgtctcggtcgagcacatctcgaaggcctacccgaaggccgacccgatcaagatcctcctccacaagctcttccggctattgtcggcccctcttgcccctctctttgtctttgacggcccgctccggccgtcacacaagcggggcaaagagatcgacactcgcgcgccggtcgtcaacgagcgcaagtttcgcgacatggcgaccgccctcggctttgcgtgctggacggcgccgggcgaggccgaggccgagctcagctttctggcgagcgagggccagctcaacgccgtgatcaccgaggactcggacgcgatgctctttggcgcacctctcgtcctctcgaagccgcggatgtgcgtccctgctgccttaacgtcggaggtcgcgcactcggctgacataccgacttcttgtaccagccgcggcgagaagaagttgccgccgaacgatttcaagatttacagcttgactgcgatcaaggagcggtacgaggtcgactgcaaggggctcatcctcatcggcctcatgggcggcgccgactacgacacagtgcgcaacccttcgcgcagaccaagtcgccgctgctgaagttgacctttcatcgtctgctgccgcccagattggcatcgagaaatgcacggtcgcgatggcgctcgcgatcgcccgcttcggctttggcaacgtcctgatcgacggctatctcaagcatccgccggcctactttgcggacccgttcctgccggcgtggcgcaagcagatcaaggacgtcttccgcttcaacccggaccagatcctcggcaagcgcaagtacccgtcggtggcgcgcaacgtctttgacaactttcccgacgtcaaggtgattgagatgcacgtccggccgatcacgagccgctcacatggcccggcctggaccggctttgaccgggtgcgcgagtgcgcgagcagggtccgacatacggccgcgctgagcgagcgcgtctttggctggcgcgagggcgttctgctcgaaaagctccgccggaacgtctggctcggcgcgaccatccgaagcctcgcgactgagctcgtcgcaccgggctcgtggaacgccgcctgtcaggcgctcaagctcgtcgacggcccagcagagtcgacgccctcgtcggctcccggcgccggccgcatgaccgacttcttcggctcgtcgcgaccgacgccacagacgcccaagaagccgtcgcgcacctctcagccgctcggaccgtcctcgcaccagccatcgagcggccgcactccagctccgccgccactgatgttccgctcgacccagccgttgctcctcaagatcacgctgatgcgcacgacgcaagacggtcgggatgaataccgcgtggtcgtcgacccgacccgcttcgttcacgaggccctcgacggcctcggcatcccgattggcgacctcaaggacattgtcaacccgctcccgaagcctgcgaccgagcgccaggtcgtcgaaccactcgaggatgacggtgacgaggaggacatcgctcagtgggacggcgcgtccattgccaacgtcgaggaccccttccgacccttcctggcctggctgccggcgccaatcgtcaagcagacacacccagatctcgtcgagacgttccgcgggaagggcgcacctgccgtgcctggcaaagacggcaagacgcgaccaagtcaccaggcgacaaagggcaagggcaaggcgttgccagcgagcgaggagaagaaattttccagcactctgcagcagtcgggcctcgcggcctggctcgcgactgcttcgcgccgctcctgggagcagaaggccagatcgatccaggtcgtcgacctttcctcttcgcagcccgagtcggttctcgacagcgaaatcgatgaggacgaggacgatgatgacgaagcggacgacgagattgagtgcctgacgcccctcgtccgtcgcccgctcggccctgactcgagcttcctcggcgctggctttgcaccgaagcggccgctcgcgtcggcctcgtcggcgtccatctcttccacgcacaccgtctgcctggacgccggtcgcgagtcgtcgccgtcgcgaccgacgccggccaagatcccacgcatcagccattccgtggcgacgcccgtcccgattgtctcgacgtcgtccggcgcaaagacagccattccgagctcggacccgttccgggaggacgacattccctacggcgacattgacctctccctcctcgctgccgccgtcgtccggtccaagactgcggccactgcagtggcagtcgagcgcgcagacgacgacgacgacgacggcgactttgacgactggatccccctcacgctcacgcaggaggctcggctgctcggctcgtgagtgagaggtgtgctcatctccttcctgctctcacctgtcagagacctgactgattcctcggctgcaggttcctcgtcgcaggctagctctcctgcgaagctcccatccagtgcggcagatcgcccttgcccacctcggtcgctcgacgccgaaccgccccctgccagactggcagcgtccagacactcttcaggccatctatgcgcccgactcagttcccaaagccggacgtgtctgctccagtatccgaccagcctcctgcctcgaggctatggcttgagcgtcggacgtcggggcacccgcatcacgctctcgctcagcctcgtcgccgaccccgggctcggccgttaggacataccggcccaatattggccttgcggcctgctcaaagccctgttctctactcgagcgccttcagcagaccgcaccctgtgccctgcgatccacatgtcgcatgttctgcttcaagagagagagagagagaggagcgtctgtttggtccctccttgcccctttcttttcgtaacgcgcgcgaccaaacggcgagcgtcgaggccagccttttttcctcgcccggcgccgtctctctcgcccagccacgaccctcgccggcctcttctcctgttctcctcccttaggccgacgtatacccccttctcctgtcagcgctcgcgaccgtcacgcgctgcaaaccccccttcgacctctgacctcgtcgatcgctcgggcgcgctggtcagctcgcgagaagctctcctgtccgccagcgcgtcgtcgcgccagtttggccggttccgctgccctttgaagatgacacggcagccttccctctcgtccagatcaacatggtcgagggtgggcccctcgtcctcggctgaacgctggcgcagaaggcttcctactgacttgacctctcgcccgcgacgcctctgtctgcctcgccacagccgtcgaagctcggatcgtcgagaggccagcctgccgctccggaagctcttgatcatgtgaggctcagcatagaccagcttccgcagagtcgacggtcacgctgacctatcgacgacggctcgtgctagacgaagccatcagcgaccgcgacgacagctactgggccgacgagcgaccgagcgtcaggagtcacgatcgactccttccctgttgagctctcgccattcgctacgatactctcaagcccaaacttctcgaccgagcctctcgaaccagagccctcggccggccccagcaagccgagagccggtcgggcacgtttgacgtctccgatgacaggaggcccgctgcggccttttggccggaagccgagcctgcaagccgtcgacgatgcggtcagtcgatggataagagagttgactcttctcatcagctgacgccacgactgctttcccccagctgggctacccaagatcgtcgcacagaagcgagtcgtgccggccagggcagtttgacagacaaccctcctcgatcattaagccggctctccggctctctggcagtcggaccttgtcgtcggcatcttgtgcttcgtcctctgcgcccagctcgctctggccctcgtcgacctcagaatgtgacgggccacgttcggatcgcagcagccttcgctcggcctccgacctgtcgagcgtcgatgatgagggtcagcatttcggccttaccggccacttgctggccgacaccgctccttcggcaggatcaaagccgtctatgtacgaacctctcagtggtcggtcggccctgccttcgagcagcaacccgaccgagtctcgctcgctaggtcaggtttcgcgactcgggtcgaccccgcccaccgccttcggctcattcttcactaccccgactgccaagcggagcatctccacctcgtcgttctggtcgtcgttctctctaggccgcaaggtctcgacaagcagtcttcgcctcacgtccttgcgtggggcggccagaaccactcccagcgcgcccccaaggccgccgccaaaggatgaccttgtgccagcccacctcagcacagtcgaccacgtacgtcaactgctgctcgtgaaagtctggttgtctcggctgatgagaccggattgcggtctgcagcatcgcctcgatgagcacgacgagatgactttttacgaagctgcggccgccgaccgtcttccgcggccagctccacttgccgcgacctggaagaacctccctcccaggccggcctcgtacgcatcaacctcgagccggtacctcagcagacggtcctctgtggtgggcgagagtgctggatctctgcgaccgaggcgacgcggcgatggctcggtctcaacctcgaaacggtccaagcgccggtcggccacatccctgcgagacctgcccccaccagtacctccgccgaccggacccctaccgcccacgccgtcgacgatctcggaatcgaccccggatgccgggaccagccgcgacagcctcgaagatctcgagctcacgtcgacgctcttctaccgcgacgacgactcgccgtagcccgccctcgtcgaccgttgacgtccccctcgacccctgcagcttccgcccggaaagaccgctcgctctagctgctgggtggttgagagaatctagattgcatcgcacggctttaggcgtccccaaagtaggacgagagcgggccgacgagcgactccatgaccttgagcagctcgcgagcgctctgctcgacgccctcctcaacgtcgtcgagcgcctcgctgacgaagcccgagacggtctgtggcacgagctcgagcatgtcctcgcccttgcgggcccagacggcagcgaccgtctggagcacgagcgaccggatgacgggcgactcggaccgcgtccggagcagcaggctgtggttgagcgtcttgaggaacgtcggcgacgccgtcgcagccgcgagcgaggcaaagagcgccgagagcaccggggcggcgtcctcggcggtcgagacctcgggcgcgagcggaatctgggcgacgaggacgggcagcagcttggtaaagtgctcgtccgaccagaaggctggcggggcagagagggcagcaagtcagcgaaacaagcttacgaaaggcagagggcttaaaagggcaacgcactgccctcgtcgtactcgaacgacgtctgaaggacgcgcaggacctgcagccagaagcgaccgttctgttcgtccttcgagacaaacgcctggagcgtctcggtcacgttgtcgagtgtcgtcgccatgtagggcgtcatgatggactggagggcggggaaggagggctcgtcagccgtctggcacgaccggattcaaggaggaatggccacgcacgcggaacttctcgaagaggccctcgaggagatgatagaaagtcgtccgccgggcgaccgactgctcgcgcttagctggaagggttttgacaggaggtggtcagctggaaggctcgcgagcagcatgcgccgggtcgagaccagaagaacgcacagtcatcgccggcgaggtcgatcgccgcccagtcaaagacgcggacaaagtagggccggaagctggcctcgttcatcttgatgaccgactcgaggaaggcctcgatgagcttgcgctcgatcgcgaggacgtcgtcctcgaggagggctgcccggaactgccagcgcgagtcgagcgccgttaggtagaaggcaaataccggcttaagctggggcgagaaggcctcgcggttcgtgtgccggatcgcgcgcttgaggaggtcgagcactgcgactgagggcgcggccgacgcgtggtcgacgtccttccagagctggaagacggccgggaagaccgtcgccggcgggacgttcttggcgaccgagttgagcaggccgtggaccgaaggcgaccgaccgccgtcggccgactcgagcagcgccggctggagcagcgtcacgagcagctgagcgaggttgttgccgaggaaggtcggcaccgctgcgacgaaggtcgcaacgctctcgacgaggatcggaaggagcgactcttgcagagtggccagctctgcgaaggaaaaggttaacaaagtcagcggatggagggtgatctgactgagcctcgaccgcagacgcacgagacttgggcagcttgagcatgcggctggcgacggcgaccgtgaaggacgtaaactgtttgatgtacgggatgaggcgcgggccgaggcggcggctgagaaccgagaggagggcaaagacgcgcttgacgagccggttgtcgtcgaggttggcctcgcccttggcgatggcgacggcgatgacgggcgcgaggccgacgtcctcctgcgtggtggccgagccggcgatgtcggcgatcgaggcaaaggctgccgcgacagtcgcgacggacgttgcgttccgagcgatctcaagcgcgatagtgaccgcgcgagtcgcgaccggcgcaatgagcttgcgcgcctcgagtttcatctcgggcaagcgcgacgtcaggagggcgatggcaccgagacgcagctgtgagcgacgccgatggaattgcgtgtcagcagagcggtgagacgggggctgcagtgagacggcgagacgcacctcgacatcttcgccggcaaggagcggctcgatcgaggcagcaaaggccgggaccgagagggtgcgaatgatagcgtcgagcgcgtcctgcgatgcctgggcgagctcagcgacgccctcgacctggttgtcggagcccgagacaaagccgatgggcaggagagcggcgacagtcgcctgaaccgagcgcgactcgtcttccgagagggccaccgcgggcaactgctggcagacggcctggataaagtggaggatcgtcgaagcccggcggaagtcgaccttagtgtcgtcggtgatgctcgtcgagggcaggaccgacgtctggcggaggaatgaggtctcggtcgtcgatccgacgtggtgaagcagcagcgtccgagcctcgacggcgaggtcgaggacggcgacgaagcggctctcgaggtcaaagacgttgaggaccgacgacggcaggacaaaggcgctcgtccggtcgacgcccttcgaccgcggccgctgggcgtagctgttgagcaggagcatgacgacgggcccgaggaagtcggtcggaccgaggacttggacgaggttcgaaaacagccgcgtcttgcggtgggccggcacgtgctgcgacatgccgatgaagacatggaggatgtcgagcgacttggcccagagctgcgagcggttggtgtcgtcctccttgagatgggcgaccatgacgggcaggatgctggcgaccgtcttctcgacgacctggaacgtaaaggcgtcgtcacgctgcgaggtgtgggcgccgacagagacaaagatcgggagcgcgttctgaaggacgacgagcggcgcgagccgggcaaactgcgagatgaggaggagcgcctgctggaacgtctgcgggttcttggtgtcggacaggatcttcatgacgacggtgacgtcgatcgtctgcgactcgaccgtcgacgggtcgagcttggccgcgaccgagcagaggccggtcaggaggagctgctcggcgtagtcgacgttgacgtcggccttggccttgctgtcgagcagggccgacagcgtgtcgagcagagccgcgagcaggtcggcgttgccctcgagcgattcaaccgagcgcgactcgagcaggacggcgaggccggcgtggaaggcccggacgacgaccgtctgcgactcggcgtcctgcttgttgcgctttgagctgcggaggctgtcgctcgctggccggagggcggacaggagggcgacgatgattgccgacgatggcgcaagagcgcggaggcaggccttgatgtccgagccgtgaacgacagcagggtcgagaaccgtctcgacgagggtctggacaatctcgccctgcagaagcgcgggcagggccgggtagagcgccgactgaagctgcacgagcgcgagctggcggaggtcgcggccgtacgccgacgaggcatcgatggccaagtactgcttgaagagggaccaggtctccggacgctctgagaagatggcggccgccgtccggtcgtagctgtcgagggtgagctcggcgaccttgcgctcctcgtccgaggcctcgaccaagacgctgccgagcatgctcttgagcagcggcgagaggagctcgatgcgtgacgcatcgcggatcgcctgggccgactcgagcagggcgatccgagccgtcgtcgacgaccaggcggcgacatgcgagaggaggaagcagaggacgccgcgcttaaagttggcgtccttcttggcctcgcccttggcgattgccatctggtcctggtggacgctgacgatgtgcgccgggtcgacgatgagcgaggccgagtcgctcaggagcgtctcaaggtagcggttgacgtcctggcccttgaggagctggaccgactcggatgcggcgccgtagacagagtcgagcgcgtatggcacgccagccttgtcctgcgagccggccgagattagccgcaggcaggcgagggcgccctcgcggacgctcttttcgcccgagcggagggcgacgagcagggcagggacaatcgtctggaagtcgaccgactcgctgccctgtgtatgggcctgaacgaatgcctctgcgtggcaaagggcgatcgcctggagcttgccggtcgccagggcggatccgtcgagcggcgccgtccagatcgaggccaggaaaaggagcgtgtcgttccggagcgtcttgaagaggttgcgaaggagcgggcccgacgcctcgagcgggatctcggccgagttgaccatcgcgtatgtcgcggtcgcccattgggcggccggcgaggcggcctgctggtcgagccagacgacctcggacatgcgagggacgtcgaccgactggagagcgaggaggagggcaagcttggcccgctggctcgtcttgctagccgagggcttgaggacgaccgtctcgagaagggtctcgacgttcagctcgatgcctacgagcgactccttggacgccgccaggaagtcgagcgcctggagcgcggcagccagctgagcatcgccgttcgcggccttgacgacctcgccgaggacgagcgtcgcaaggaggcggccgtgggcatcggccgaggcggcctggccgacgaggaacgaaacgagagcctcagacaccttggacgcaacgacgttggctgagcagcggaatcggagacggatcagtctcggttgacagaacggaaaggagagaccgggacgaacaggcgatgccgcggatgacgagctcgttggcctcggcctgcttctggtgcttctcctcggtcttctcgccgagcttggccacgatcgagggggcgagtcccttgaggagctcgttgacgccgagaccggccgcctcggcagaggcgaggacctcccaggcgtgctgtgccatcacctgccggggcttggtgacgagcaagagaccaaagaaggccttctcgacaatctcgtcggcaagcgacgggaaggccgacgcgaacggaccggcgaggaactggaggtggcaccggacgacggccttgccggccgagggagcgttgacgagaccgaggagggtcgtcaggatcgtctgcgggtcgtcaaccgtctggatgagggtcgagggcgagccgtagatcgtctcgatgacggggacgtaggtgtcggacaggcggagcagaaggttgctcttcgccgacgcgaggatctgagagcagcgcaggaggcgtcagcgaggacactttgtcggaaaggatgaggaggcacgcacctcggcatcggcgtcgacgtccatgccgtcatccttgccctcgagcttctcgagcagcgaccggatgccagagagacggctggctgagtcggcgctgttaaggctgagaaagacactcgtgacgtcgccccgggggtcgaccttgccgaccgagtcggccaggccgaggatgcccgacttgatctcgccgtcgaccttggcgagcacgtcgagactctcgtgctcccagagcccggcgtagcgctccttgaggacggcgaggattctaatgacgtgctcgcgcgaggcaccctcggcgtccgagagaaggaggatgcgcgtcaggaacgaaatgagcgacgccggcggcggcgtcaggggcgatgtaatgaaggcctcgagcgtcgaggcggcagaagggacgtcgaggctgtgataagggaagtcggaccggagtcagcagagtgcagggactagcagcgaccgagtccggttttgggcgcacttcttgacgagcgagacaattatcggccggagggccttggagacctcgtagccggccgagccctgggcaagaaggatgccgacatcgctgagcttctggaagccctggatgacgtcccgaccaatctcctggagctcctcctggctctggagcaggccaagcatcgtcgacagcaggtgggccgtccgcgtcgccgacatggccttgcgctcgggcacagcggcgagcatcgagacgaggagggcgtggatcgcctcgggcgagagcgtcgccttacgcgcaagcgcgagaaggacgatgaggttggcggcgacgacgtcctcgtcggtgctcgagaggccggcgacgacctcggggacgaggaccgagagcgcagagtcgctgatccggccgccgttgaggccaccgtgctcgaggtagccgacgagcgtcgaggcgtggaagccgaccatggtccgatgggccgtgccagccttgagcgcggttgaaaggagcgaggcgacgagccgaagcgacgacagcgtcttgtccttgtggagcgagactacgaggtgttgacgcgagagcggcaggtgcgctgtcttgggcgcctggaggaaagtgaggtgcgagttgggcctggcgcgcgctcaagagaggtcagggcagcgcttctctgaagacgtgaagcaaggaggacgtacgggatccggaggatgctgaggatgcgcacaaactgctgcgagtcgtgataaggcaggaagcaggcgaggacgccgtcgacgttcatttcgtgcacgctgagcgaggtcagaagacaggtcagcgccaatgcgaaagcgaccggagcccggactgtcggccagacagcgaacgcaccggaagcgccggacgagccattcgatgaccttggctgccgcccggagagggatgtgcctactgagccggccgaggaagacgtcgagcgtcgcgccgagtcgctgattctcgcttagcgggagcagcaggcggtcggcctgcttggcagcctcgccaaagacgtcgtcctcgaagacgtcgagcgacgggtcgagctggcggagctcctcgaggccgttgatgccgagcgagtggatcgtctcgagatcgtgctgggcggcctcggtcggcgtaaagaggtacgacggcgcggtcgccgactgcttggccgccttgagtcgcgacgagtcgagcgacgcgatggacgcgagctgcgcggcaagagaggacatgatgggaggaggcctatgcgagcgcctgaggattatggtgaggagggagaggaggaggcggcggagggctggctgcgctgaagattccaaatctgcccctgcgcgcgcgggcggttgagcgcgatcgaagctggggctgcctctcgcacggagacaacggctcaagggctcgcagcagagacgatgaatggacagcagggcatgagaataggcagaggcagacattgtacagataggagactgcgagcaaaagaagggaaggaagggtcagtactcgaagcccagacgagggcagcggcgacgggagcgagcaggagggcaaaaggcaagggggcatcagaagatgttgatatcctcgtctgctgcagagcgaggagactagctccttctcgcctgcagctaagagtgtgaatacaaaataatacgtctcgtcactttgggcgaaagtatgggagggagggtgcggttgacgtcggaagctgtccctccgagggctggagtgcagaggaaagacgggctcacctcaagcttgttgcgcccccgctgacctgccgccagacaagtcagacggcgagagttggcagatgccgcctcaagtagacgacttgaccgacctggcgagagatcgacgtcgggaggtcgagttgagcgagcttcgaaaacagaaggcgcgggcggaaaacgaaagtgcagacgcgagctggcggcgaggggcgcagcagggccgagcaggccggcccccctccctcgacagctcctgcctgctcctcgacgaccaccctcagacgcagggcttgactgcaaaggatgccgctcaccgctcttccctcggacctccggctcgtcgtcctggcctactgcctgacgctctactcgtcatccggccggccggcctcggcctctcgcccgccgacgctgctcgccggccagctcccgcaccaggtggcgatccgcgacggcacgctcgtcatcaacgtctcgcacccaggtagcggcagcagggacgacagtagcttggtgcgaccctggcacgggctcgggaagtggctccgctggtggtggacggccaagcgggctcagcgtttacaggtggacgagcaggcttgggtcgacgcaatccatcacacggtccgtctctctcaacctagccttccaccaccgcaacgctctgacctgaccgtgcttgcatctaggcggccaacatctttatgctctgcctccaggcgcgagtcagcctcgtcctgccgctgcttggcctcccaatcgcctggccgcgcatccggccctcggccgccgcgccgactcgctcggtgctcagtcgcttccgaccgacgctcgccgccatcggtgtcgcgacagtgctcggcgaggtccagctggtcacgctcgtctgcgcgcatcggttcttcgaaagccggcggcggcgccaccagcttcagctcgtcatccgcggcgttccaatctcttctcgcccggtctcgcctccagcagaaggcgcaagcacgccggcgacgtgcccaatctgtgcagcggccgagagcgacacgcctgccgacccgattgaagccttctgctcggaagcgcccttccagcacctcttccaccggtcgtgcctcgtccgctggctccggaccttcacggccgaccaggcgctcgacgacagcggcgggaacgaggttgttctcggctctgctccgtgggctgcaagctcggtgctggatcctgtctcggctcgggcgagggaagccctccaggagctcttctggcgcgcaggcctctttctcgacctccgggcaaagcacgagccggtcggacgaccgccggcggcccgccaaccgccgccgacaaagatcatgctcagctctcaagccgctgagtatctctcgcacgcgactcctccgagtagctcctggaacctattcggcaagctgccggctcctttccggacctggcttggctcgctcacgacctccgccccaccctgcccggcttgtcgctcgccacttgtcttccacctctctctcgccaggccggacgccgagccaggcgaccgaggcctcggtgcgctctggatcgcgacgtggtcggccctcgtcagcgggcagacaatatgggggcgcggtaaggggatggcaggggcggtcgccctcctggccgtccttcagagtttgcctagcatctgatgaccactcgacaaccatgcaccagactgcagagcttatatcatactagagcatggcagaaacccaggaagcaagagaaaaaggcaaacacttcgaaagctttactcctcctggtcggcctcaccaagcccgcgctctgggtcggcgttgaagagccggccggcggggacgagccgggccttgggattgaggatgagaccgaaaccaggctcgtccgagacgtcgatccggcctccgatcgggattggctcattgaggaagaggtcgccaaagacggggaggatcgacttgccgtcgggcgagttggcaatgtactcgcaaaaggggctgaggggggccaagcggggggggagagggagggagggccggaaggggggccgagctgcgccgggggagacgaggagcttccggcggcgagaaaggcgttcgttcgtgcgttcggctgcctggaaaggagagggagcgacaagactggagagaggccagaagtgtagtcgagcgatatgcagagaatccaagagtcaagattgaagaacagatgaaggtgctggtcaaaggcgaggctgggcattcgttctcagcagggatcgactccgtgcgcgcgggggagcaagacgcgtaccccgcaacacagttgaggccggggccgaagtgccgaacggccgacggcacaacagacgagcaaggtgatggtttcgagcgagggctgaaggtgccgacgacggttgtcacgtcgagagcgacgctcgctgatagactgcacgacgatgttctgagcctgacctggggcgcatgatgccgtccattcggtctcgcttcgattaaggcggctttggatactagcgtaagaagaagggggcaacgagcagcaagttgggtggggggcaatttcaggcggctgatacagtgtgtttgggaggacgggagggagaggaggagaaggtaatgtgcggagggtgacatgaggcgattctcgctgacgcgcatgggatgtcgcgctgcagcgtgggattggccgtcttgaagcggtgtccgtgagcttgtcgccgtctttaggcgagcgagcccgagaacttgtcgccccggcggtaggagcggaaggcgaggccaatgaccgagacggtggcgaccgtgaacaggatccagaggatccacgcgaagcctgatgagcggatgagacggtgatcagcccagtgctacatattagctaggagacggcaacggacgcaccctcgagggcgttcagctgcgagcagttgacgtagtcgcggccgcaatcaaggccgccgccgagcatggccgtgaccgaggcggcagcggccgtccagaagatccaggtgagaatgagccatccagcgtgcgaggcgaccgacgagatgatcgaggtcgcggcgatctggtagaagacgaggtaggcgatggcgaagacaagcgtccaccagctgacgaagcaggtgaagcggatccggtcgcggtacgaggccgaggggtagcttcggttatcgtaccagttgacgagccaggtcgagagggcgacctcgacggcgccaaagaggatgatgaggccaaagataactgccgaaggagggagaaagtcgtcagcctgccgctctcgagacaggatgagactcgttcgacggggagcaaggccgcgcggccgtgccccatcgtctgcgaagaccccgcgcgaatctcgttgatacggaagaatcagaactaactcggctggcctaaaaggagagagcagcagcagctcgtcagctgattgtccagcaaggggaaggagggagatctttgcgttcgctgacgccagcgctgactcgcaagcgagacaaacgccggaaggtcgccggcggggtggcggcattgcgagaagacagcgagagacgtacctcggttaacgtgagtgtcgagcgccatgatgagcagaaagtattttttgttagggaggaagttgggctggtggcgaggaggtgaatgggatggaagaggtcggagggagacaggaggagcgagccgcccttttggcccggggcggccgccgccgcagccgcgcaggaacgaaatcgatgacgcagcgcctttgagcccgttggggcctgggctggcggcccctcagcgcgctcgctcctgcccaaagcgacaggtcggtctcgagaggagagtgcgtcctccctttgctcatcggcgaggcgaagcgcatcggctcgtgagggcgcgcaagcctgctgccggtctctctcatgggtagcgcagctgtcttgcgccgcatcactcgtcctacctcaaagatacaaagggcgatgaatcaaggctacagatctgcagtacctccgcgtcgaccagcccgtctactgccagttgaggtggttgacattcgggccgtaccggtcgccctggacggggaactccttgaggatggcatcgagccgagcaacctcctgcaaacacacaaaaaccaaggtcaggcaatataggaagagagaggctaacgggagattgacctcgtccgacagttcgacatgcgcagccgcgacgttttcgagcgtccgctcgcgctttgaactcccggggatcggaatgattttgctcgagagcgcgaggcaccagccgatcgcgagctgggcaggcgtgatattcttggcggccgcgagcgccttgacggcctcgacgagcttgaggtttgtcgggaagtttttgcgcgagagcttgggccggtggcgggccaagtggcctggggcagagaaagggggcagaagtcgtcagacgacgagtatatgaggagatcgagatccgaaggctaccttcagggatgtcgtcgtgcgacttccagtcggccgccagggcaccgtacgcaagaggcgctggcatgagtggaaaggtaaagctgtcagacccgccttcagacggatagttctccggaagggacgcacagtagccgacgagtgcgatgtcgagctcctcgcacgccttaacgacctcgagcagctccggctcgaccgagagaagcgagcactcgacctcgacggcgacgaccggtcccatctgggcaagacgagcgccaggagggaggatcagcctgacgggtgcgagctaggcagtctggggaaataagacgcacagcagccgcctttcggagcgtcgaagccttggtctctgacagactgatgtgagagaagaggccctccttctggaacttgagcagcagcggctgcgtacgcgaacggtaccccagtgataactccgtcagttgtccggcccccgcaagtgagcccagactgaacactcacgcaccatcacgtcctcgactggcttggacatccgcgcgacctcaaacaggtcaatcttcttgatcggcgcgagaatctcgatagccttctcgaggtcggcccgaagggcagcctcatccgactgatcgagccgggtcggagcatgtcgtccggtcagcccgcccaatcgatagatattggtcgagcaaggatgacgcacgatgtcgatctgaagtccacccttgaccgaaaggacgaccttgtcggcataggccgggtacttttcgaaaaagcggcgcatcagcttgatgttggcgagcgggtccgggttgccgctggatcatcgcaagcggtcagtgacaagggccgaggagagctgctcttagtcagtcgactcactagaaggtccccgagttccagctggtgcagggacgcttgagtcagggtcagggccactcctgtcgaggcggctgccagctagatgtgcgactgacaagttggatccggcgtcgacggccgtcttcatcgtctcgaaggcctgctcatcgggcgtgtcgtcaccctccttccatgtcatcatcatcaatcctgttcctctagagtgagaaatcgggaggaggggaggaaagagatgcgtcaggtcgggctgcagacgtccgggtgctgcgggcggccagtcggctggccgtcaggctgagatcggagggactgacatggcgccgacctcgaggccagacgagccgagcttgcgcgtagggataggcgaggaggacatggctgcttgcgagagagaaaaaggtgatggtcagaggcgagcagcagcagtagcaaccgctccttttggccagtctgcctgtcgtccggccatcttgctgctgtcgccgaccctccacctcggccgacgcctcgaagctccgaccgttgcacaccaatcgccctgactcgattctctcccgcccagctcgcccaccctgttccccttacgacgcctcgtcgtccgagccaccacctcatcgcctgcctccatccgccgcctccttgcccgcccgatgtccgccacgctcctacagcccggtccgccgccgtacacgccctcccactcgggcctcgtcacgccgagcgactatgtcaagctcgacccgtccgtcacgctcccaacggtccggcacgtcggcctgctggcctgccagctcgacccgctccgtcggacgctcgagagccgcatcgtctcggtcaagccgtcggcgcctgccccgccgccggcaaagagcggcaagcgggcaaaggcgaccgacgcaccggccgccctcgcgcctgtgaccggccgcgtcttcgaggttgagctcgaggacactgtgctattcccggaaggtggtggccagaactcggacgccggaacgatggtcgttgccgggcacaagctctcggtcctccacgtcctccgccaaggcctccgggccgtgcactttgtcgccgtcccggctgaggccgagttggccgtcgtcgaacaggccgaggtcgacgttcacgttgactggactcggcggatggacctgatgacgcaccacacgtcgcagcacctcctttcggccctcctcgacgccctgcccgagccggccgagacgctctcgtggtcgttgacgccggcgccggcgccgtgctacatcgaaatctcgcgcaacttgacctcggccgagatcgccgcggtcgaggaccgggccaacgagctcatccggcaggggacgcgcgtccgggttgaggtcgaggatcaggagggaggccagggtcgcgagctgaccgaggatgaacgcgagcggctgcgcaagagcagctcgagcatcccaaagggtgcgtttccgaagcgctgacctaatcaagatgctaatatgacgaccgcctgcctgccagactatgagaagggcgttgttcggacgatcgtcatcgacggcgtggaccgcaacccgtacgcctgcctttcaccttgactcaacacttgcccaccactgacacgtctgcctgccgcttcagatgctgcggaacccacctcccgttcctctcgctcctgtcggcgatgcacatccttccaacgacgacccctcatacggccaagacgcgccggctgagctttctcgtctcggaccgactgacggcctacacccgagccaactcgaccatcgtcggcgccatctcggccgcgatcggaggcgccctgcctgcaacgctccctgaccgcatcggcgccctctccgacagcgccaaagcggccgacaaggcagtcaagacgctcaaggccgaattggccgaccttgtcggcatcggcctccagagcgcgctcgagccaggtgcgagtgccaagggcctcttataccggcatcgggaggccgccgtcgaggccagcgccgggaccgactttctcggcttcgtctcggccgctgccttcccgatttcgccggtcgagggcggcccgcctcagctgctcattcaaagcgcatcaagcgtgagtcgtctcctgcgcgctcgtccagttgcgaccccttggagctaggagctaattctcctgacctgtcagcccgccggccacgccatccatctctcggggacgccctcgctcgtcgccgcgtttggcgagcgacttaagcaggccgccctttttgccggccggatccgcggcggcggcgcgaagggcaagtggcaggcgaagctcgccgacggctcgtttggcccggccgagcaggcctgggtcgaggacgcgctcggtgagctccggaaggggctttgaaggaagcgaagcggagttgtaggacgaaaaaaaacaccatctagagggactttatgcaaagaacgcgttgtattccgaccggccggttgctcgctcgctcgctcgagggcacgtcggcgacccttgcccggctctcgtccgcttctcgccgaagagcgtctgacccaagatggaccggctggcttggcagcggccggctaacgcggggccgcttccgacgaccgacgcgcgctcgtagcgcggatcgctcttccaacgctaatcgtctcgtcgacctcgaacgggctccccatgctggcgtgcagcgacgtggccacctcagtcccgcttcccctggaggcgatgtgcgctctgatgctgacactctcttcgctggcctctctcgcagcagaaagggtggaggtcggtccaaactccgccgttgtttggtctctatcttccgatctgatttcgtttttacggctgacttcccggcggtcctcccgtcaccttcccttcttttccgctttttttccctctcgaaggcttcccttccctcgaccaccacctcaatcttcagcccatgtcactcgcctacgacgataagcccatcccgctcgctgagcctgcgccgggctcgctccactcagatggcgacaaggagcgcgccctcgacgccggccagaccttttcgtcgagcgtcggagagacctctgccggtgtcgagcggattaagctcatctcccagtcgatgacgcctgctctgcgcgggctcatgctagcgagcactttcctgattgcctacacgtacgtcgcctggccagctgtgacctgatctgcgggggattgacccaaccccctctttcctcatggcagctacggcctcgactcgtccacgcggtcgagctatctcgtgcgcatcagcctccttcatcgtcttcttctctcgctgatacctgtcgccgcatctgccctcttgttgtatgaaggcaaccgcgacggcatcctgtgagttcatctcgccttggataaacaaccctcccttctggcaacgttcgctgacgccttgacggccacagactcaactcactcgctgctcacgaccgtcaacgtcttccaatcggtcgtcgctgccgtatcgcaggtcggtcatctccgtcctcatcgactgtcatcgcccgcgagcgatactgacacccattgccgcttctgccagcccatcttcgcccgcatctcagacacctttggacgcctctcgctcatcgccatctcggtcctgttctggtgcatcggcactgcagttgaggcgtccagctcaaatgtcagtttcctcagcgagcagcctgactcgtggcgcgttgctgaagagcctccttgacgactgacccgaaccgcaggtcaaggcctatgcggctggcgcctgcatctatcagttcggattctcgtgcatcatcatgcttcttggtgaggctgcctccactttttgctttcgagaaccgtcgctgatacccgtctgcagagatcatcgtcgccgacctcagcagcctgcgcaaccgcgtctttgtcacattcctgctgcctcttcccttcgtcatcaacacctgggtgagcggggacgtcgctgcaagcgtcctcagcgcgacgacctggcgatggggcgtcggcatgtgggccatcatctaccctgcatcgacgcttccgctcgtcaccgtcctcgtcctcgcccggcgtcgggctcagcggctcacgcactacaacacgatcgtccctgcctggcggcggaagggcttcgtgcgcgcgcttgcctcggagctcgacattgtaggcctcttcctggtcagtcctctcagctgccgtggcttgctcgacggtcgattctgaacctctacttcgtccaactagcttgccgctgccctcctgcttattctcgtccctttcaccattgcgggaggtgtctccaagtcctggagtgccgctaagatcatcgccccgctcgtccttggcttcctgatggtccccgtcttctgcctctgggaggcaaggtacgcgagccacccgatcatcccagcctcgctccttcgggaccggacggtcatctgctgctttggcatcgcctgtttgctcaactgcagctggtgagttcgcgtcgatctgtgtcagtcgccgactcgacagcttacgcccgtcgctcccgtgccctcgcacaggtacctccagggcgcctacctgtacaccgtcgcccaggtcgctttcggcgagtgcctcgtagaccgcgattcgagaaggctggaactgatcctccctttcttcgttcgacataggcgagtccatcaagtcggcgacgcggatcgcctcgctctactcgttcaccagcgccctcaccggtctcgcgatcggcttcatcatgcgctacgcccggcgcgtcaagatctttatctttgccgtccgtcctcttcctggaggctctgcaatggggaggtcgtcgctaacatgctcctgctcgcatcacccagggcaccttgatttacttgctcgcctggggcctactgatccgcttccgcggctcggctgcggacagggatggcctcatcgctgctcaggtcatcctcggtctcgccggcggtgcgtcgcgcgcctttggacctgcggagcgcgctcgactgaccgtcttcttgtcgtttctcaggcctcttcccttaccaggcccaggcgctcatccaggcttgcgcgtcgcacgaaagtcagttcagcatccagctgtctcacgtccactcgactgatcacttctcgctgtttcctttctcacagacctcgcggtcatcacggccacctacctcgtgcgtggctgctcccatccgactggcaatcgcctctcgagagcctgctaacctctcctcgcagtcctcctattcgattgggtcggcgctcggtaacacgatctccggcgccctctggacacaggtcctgcccaagaagctcgcggcgagccttggcgacccgacggtcgcagctgccgtctacgccgatccgtttacgtttatcgccgcgaacccgatggggacgctcgcgagggaggccgtcgtcgttgcataccgttctgtcctcccatctctcccttcgcctctcgcgattggcgctaaaccgttttctttccctctctcggccccacctcgcagagcaaacgcagcgcctgctctgcatcaccggcatctgcctcgcggtcccgctcgtcctgtgcgccgtccttgtccgcgacgtccggatgggcgacgggcagaatgcggccgagcccgaggaagttgccaagaatgagacccgctgagggggcagaggttcggtgacatatcctcttggccggagatggccggagacgggttggtcggcttcgtccatcttcgacgcggtctccttgttcaaagtagctttacctgtccttctttttcgcttttcttgcacttcactcttccttcttcttggcccttcctcatgacgttcctcttcctccgacccttatctaccgcagcagcatctaaagagccaaagggcgaggaggaaaagcgctacagaagtggagaaggggcccggtgcgggcaaagctacaggtttgagattgggcaagggcccgccgaggggggggggaagagaaaaaaaggtatagatggaacggtgggtggtcggtcgaacggcaaaagagggcgtcgcacatctaatgtcagagtgggagagaaaagagggtgattttcgtttttgcgacagagtggtggttgatggcctcggaagggccggccggatgcgagaggaactggcgccctgctgccgacgtggccagagacctgctcgggcccctcgatgagagctctgaccaggcaggccccgcttcagcgcgactcgtaagggttcgggttctcagccccgagcgctgccatgttgcccctccgcatgctcggcttgcggctcggggcgatgctcggcctccggctgcccggctggctcgcccgtcggctgccagccgtgctcggccggcgcgagagcggccgcgaaccctcggccgtcacgggcgtttggatgccggatgagagggccgactctgtcaggtcctcgagcgcagaggacgacgaggctgaagcgtagggttcggccgtcgtgatcgtcaaaggcgagggatgcgaaggcgtcgaagacgtcatggccagcccaccgaaagcgtgcgaaagcgcagggacgtttggccgctgctcgccattgggcccgggcgagtcggaccgatgcggggagtggtggccgtcggcggccttcagagaacggcaaaagagagatagggagtgtcagccggaaggcgatcaggtgaggaaagctagctgaaagcgaggcaggcccgcaagagcgtgagaacgagccggtccggagctcagcccggccggcagacacaagcagcctcatcccctggcgccccgctcgactttcagctgaaggaaaagaagggacggacgaggaagggcgatccgccgccgctgccgacgctgaacgagctcgaccggctcttgatgagctggatcgcccgggcctcgatcagggcgtcaaagtcctgctggagctcgtcttcggtcggcagggggttcttgaccgggtcctcctctgtcgtgagaaaaagcgtgaagaagagatggcgagaggtcagccgtcgaggaacggctccgggaagaagacgaggggggggcgtcgagccgctcgcccggccggcgcgggccggaagagcggcggaagggtggggcagcagcaggcgccgggggaaagaaaggcgaacggactcgaccgcttcttgaactcctgctcgagccgggcagtgacggcgttgacgtcgagtgtcccgagcgggcttggcgagggccggctggcggctggcgttgcgagccggcggcggcatgaggaagagggaggagaggaggtggacggggacggcgtcatggacggccaaaaagcggagcgacggcgggcggtcgtccggaggagcatggacggcggacgatggaatgggcgtcgtcgagaagacgggcgtgcagtgattgtatcggatgagggagcagaggggccggtttaagagagggcgagatgaaggcaaggttcgggaagagagggggaagcatcagccggaaggatcgggaggggcggcggcgaccatctcgggaaaacggctctccgcgtcaaggccaggtggagcgaagacggacctgggagtgcagactgggagctcatgactagaaggcgagtaaacgtgcgaggaacgaggtcgggtcggatggaaggtgaaggtcagagacgaaggagaaggggcggcggcggcggcccaagacgaagcgcgagcgacaggcaagacgggcgaggctcgccactttgatccttcatctgcccctcttcggcccggtaaagcgagagcgacatgcagacaagaagccgtcatctaccatgcatcctcttcttgtcctggccagctgttgctgctcgggcgagcggcgtcgttccttagagactgcgccgccgccggccgggtcgagctcctgcgcgcctcgccgccctgctcgccctcaacgaccagcacctcctaacaatcactatcagggcgggaccctcttcaaagagcatgccccgctcacctccacccccgtcgacgagtgccagcggctggccaaacaggcacgaccaacgctcgcgctcgcgctcgcctggaaggccgccgttcggcgcgagacgggacggcggcggcggcggcgacccgtatgccagcggcggacaacgtggcggaccgccgcatggccgggggggcggatgggattggaccccgccggggggaggagaaggaggtagaaggtatggggacgatgtgcgacgatccgatcacggaggcgggcagggagggccgtcgtacaggtcgggcggaggaggcggcgggtacggcgccagggacaaccgtgagcgcggcggcggcggcggcggcgggcgaggcgactaccctcctcctgctctgccgatgggcggtggaagatcaggacctggtgcaaggcgcgatgccagccgagatcgaggtccgtctcgttgcgcactcctcccagaggcgagacgccaggcgcgtgctgaccatccagttcctcttgccattgcgaccggcaggttatggcccgccttcatcctaccgccggagtccctccccaggcggctatcgcaggcgctccccctcgcctctccggtccacccgcatccccgccgccgctggcagtcgggcgtacaacgacgcccctggccctcctccagcccgcggaaggccgccttctcgctcgccttcgcgttcgcgctcgccagtgaaggctggcaagggcccgcttggtccgggtgacgaggcggaagagggcgaggttgtagaagagggtgaggtccggcttgagcagtcaacgtcggcgactactggcggcgggagaggcaggcgctcgccatcgactgcatctcggcggtcagactaccgccggtcgccttcgcctcctcccttcggtcggccggccggcgggcatggttttcgaggaggaggccaagacgagcccttccgccggccgccctcgcccggtttaccaccgcgcggcggctcgcgctggccaggaggaggaggaggaggcccggcaggaaacggccggcgatccccttcgccgccctttcgccgctttcgatcgccgtcgccgccctcgggtggtggaggaggctggaggcggccccgggagccgtcgccaccagcacctcctgtcggaagagaccgaatcagcaacgcctaccctcctcccgctcggcgctcaccgccgcctttccctctgccggccgggttgagataccgcagcccaagtccacgagccaacgagcccgtccaacgccggcgcttccggagcccgagccctgccggacgcggggaggacaagagtgtccgtcctggcccgccacgagcgggtgcgtggggcggccagaagccgttgacgtcgcctgagaggcagttccacccgtcggcgccgccggcatcgctcagtcggactgctgggcccggctcaactggcagccaagcgccgccgcagcagggctggccggatcgggatctgcaggtcgctggagggtgcgagccagcggacgctcatcggcggattagcggcggagcggaggtgtcggccgcgcggccggtcgggggcgacgagtgggcggcgaggatgaaggctcggcaggaggagaaggaccggcttcgcagggctggggggggagagtctgttgctgctaccgctgaaggcagtcaacaggatgaggcacctgccagagtgtcctcgccgccattgccggctgtcattgcatcgatcgagccgacccgtcaggcctcgttggacgaccggcgctcgtctcggcccgcccagccaacaccgcccgcacgagcgcccctgccaccaccatcaacattggcgaaaccctcaatcgcgcccgccaacgatcgccgatatgcgtcgcccgaccggccgcaaccatcctcggcccgcttcaaacccccctccggcacagccgccgccaatgcgcctcccgtccctgcttcccggcgcgcgccgtcgcccgaccggagacgctcaccgtcgccccctccccagcgacgacagacgtcgtcgtcaaacgacccgtggcagcaacaacaggcgccgccgttggttgctggctcgcgctggaaaggccggccagacgctgctgacggagagcggtcgtcaactgacaagcaagcgacggaggacgtccagcgcggtcggcaggacggtctatcacagcgccagcaacagcagcagcagcagacggtcgagcagtgggagcgcgagcgcgaacagcacgcggcagagcgcgagcgtgagcggctcgaaaaggtcgtctttcgtttggcggcggggctcgtccgaccgacaacggcaccggggccggcagcggaagcggtcgcagaggatctagcggccgacgtcagtttctcctatcccctttcgttcctctgtcgccagagatgctgacgccctttcgactctcgccctcgcagctcgcacggacgacagcgaccctcagtcggctccgggccgagcacagcaagctgacgtgggccgtctggcgggccgagcaggacgtcaaggacggcgaggttgagcggctcgccgtcgttgctcggcggctcgcggccgaggaggggctcaagccgtgaattggttgatggctgcattgttgagtcgtgcccgcaggataagcaaggtcgagagggcgaagcgagtcattaagatgtcagggcaaaggttcgtgtcgtgtatgaaatggggtctcggtttcgtttagctaagttttgcgtttcgcgcgatgaaatgttgttgtgaggaagagggcctccagcctccccttcttctgcctggccgtagcctaaacgaacccagcgccgcgctgctcgccaagggtgccgtggctgccgctaccgtaagcagcgtctccgggcgctccctgctggaacgagatggttccccagccgccgtcgcgcgtgaagggagcgttgacgcccgcaactccgttgccgtgcccgtggtgtccgtgagcgccggccttctcgttcaagcctgaggcggccgacgagccaaggctgtagtcaaagcggccgggcgcagacgccttggggtggcggatgaaactgagagggacgcaaggctggtcagcacagcgcagccagaagcacggcgggtgaaagaggatgcacagggactgctggcgggggagcaggatgtggttaaagcggaagtcccagatggaggcgaagaccatgcggaagctgccgaacgcgcagagcgtgccgactttaggcaggaggggacaaggggtcagtacctgcagacgacggatgagtgccaaagggggggggagggggggagggcttgggacgcaccgaggaggccgccctgatggtgagagtgaaggcgggcgcagtcagctcagtcattcaccgccgacagagagcgtcggtgactcacgatgacgtcgtgtgcatggtggtactgtagacatgagatggattagcgagcgaggcgaggccaacgaaaaggtgaaaaggtccttaccttatcgatcgtcaggctgccagcaatgagagcggcgccgagcaggggcgcaaagaacaggacgtctgtgttaagggtcagcgaggaggagaataagtcgcttgagcgcacggcggagagattgatcaacgcacgcttccagtacctgacgaaagaaggcaaggacgaaacttatcagctggtgacgaaagagacgaagagacacatgtgacgcacgctgggtggttatctgaaaaaatcttcagcatggcgttgaggtagagcgagaggtagacaaagccagcgcctgcggccgtcgagtggcccgacggaaagctctcgagggcgtcgttgatctcgtgctcgtcgccggtgcatacgctccggtcaaacatgatcccaccgaagcctgtcccagtccctgtgagctcgggcgtgatgacgggcttgcagacggcgaggaagtggggactgtcaaaggggtagagctccagactctaaacgggcaagcaggcgacggcgcgacaacttaccggaaaccgccgatgactgggatgcgaagcgacgtcagcaggtttctgagtagttgttgttgacagcctacgtacgccacttgaggaagacctggaagacggcggcctgtgaggggagcgacagccgaaagacgtcagcgagcgaatggcagcggccctttcggtctggaccgcaccgtgatgagcgacatgagcaggcccatcgtcgtcgccgtgaggtcgtggaagctccggcggcgaatctgcatgatgacgaaaaagacaaaggggacaaagaaggcgaggagggcggcggcgtagatcgggatctggaaggcgaggggcgacgcttgatgagcaggcatcacgctgagcgtgtctacagcgcggacgtacaatgttcttgcgcagcgggtaggcatactcggggtagacgacctcaccgttcgagaagtagacggggaagttgcgcgaaggagccgggccggcctctgcgagaggagggaagcgtcagcagcgacagggggtgacggcaaacgatctcgcttgcagcgcaccgtaaatgccaagtccgacagcgcccatggcggccatagtctacgagcaaccagaaggtcagcgggagaggacgagggcgagacaggggcgagccggcggacgcgacgtacgatcaggtcgacgccccagagccggagccagccgccgaaggtcgtcttctcgtgcccgccgaggccgcccttgcctcgagtcggcgccatggcgtcctgcgtgccgtgggcgtgctcgccattgacaatcgtcggctcacgggcggcggtcgagtcgagcgaggtcgtcatcgtcggctgcgcggtcgcggtcgtcgcaggctgctggtgctgatgctggtgctggccgagcatccttggtagagtgggttgggaggtcgagagtggatgttggtcggcttcgggcgtcttagaggagcagatctgcctcttgtaaggccctcgctcgccccttcgtcggatgacccgtggtcagagccgttgcctgctactcgtcatcacggcagggaggcggaaatagacagccggccgtggtcccgcagagcaaacttaggccgccggcgtgacggcatgtgcatgcttgcgggcgacgatctccaggcgggcatgcgcgcgtgtgcgagagactaggcatcggctgtctgaagcgtaagtcggagagtcgagctcgaggcgagatgcggtcggggggaccggttgcgggcgcgcgtggactgagcggcgggcgacagcgagcgtttccctctgtgtcggcccctttcttcctgctctcctcgctcaagccggcggcggcggcgacgagtcggcggcaagtctacaattgggtacgggtgacatcgtcgcgtcgcatcgcagccagcctaagcggacgggtacaggaggaagggcgcaaagagcaggcagtcggccccggccggcttgacccactctcggttgaagtcgtcagagacgaccagaccgtgagcggtcgaggcccgaaccgtatcttacgtctggacgccgaggggtgggaaggactgtttgttgatctcgttcaggtgcggatgaacgcacgagcgggaggacgccgaagcagcggccgaccggatggtcttcaagtagctgctccaggttgaggccatcgacgtgtgccagatcgactcgtgtcgtctggccgacgtcaacgaggtcctctcagtcctgctcatggccgccgaggcgggcgtccccgtctgcccgcacgccggtggagtcggtctttgcgagatggtcattcatctctcatgatcgactacatctgcgtgagcgggtcgtgcgagcgcaacgttctcgagtgggtcgatgagtgagtgcctgctctttctcttctcgcttatcatctcgcgctggtcttttcgatagagtgctgacgccatcttgccctctcttccttctctcccttctctcctctcttccctttctctcctcttctccttcctccttctcccccggtactgtattgtggttcccttcaggctccacaaccagtacatctggcctgtctccatcaacaaggagggaaggtataacgtgcctatggaccccaaaagtggctactcgatcaccttcaagcccgaggccatcggaaagggggggggggaggggagggaagctggcttcctcgaacgtcgcgggtcgtaaaggagatctaagtgtgtatgggctgttgggttagccgacggcgagcaaagcgagtgataagtgtgtgtgtgcgagagagagagagagatgcaagggtaagggaggtgtctaagcgaggtgcaggagggccgcggcgacgaggaggccgaccggcaggctgagcgcggaccggccggccgagtccgcgctgctctccccgatccctcggagcggaaggttgccgccctgcgtgccggtcgtcgtcgtcggcgctgccggcgccgtcgagttggtctttggcccgctcgcgccgttccggacggtttcattccggagagcgtacgagttggcgacgtagtttgtcgggaaggagggggtctcggacgagtcggcgaggagcgagcagtactcggtcgacgtggcgttgaacgtgtagctgccgggcggagcgtttagatcagcgagagtctcatctcgttgaaagagactgaggggtagagacgacgacgcacagctcgttcgtcaggccctcgggcacccagccctggcgggtgctcgtctggaagctccacgtcggcgccgcgtccgtcttccagctccaaaacacccagccggccgaacgctcgtacacggcccgctgggcctcccagaagtggttgacaaagaccgaggtggcgggcgagaggtcgaggttggccgacattggccgattgatgcactcttggtactggacgcaaaaggtctgtatgccgagcgacatctcgccgactggcggcagaggaatcgatgggctgggagtcagcagagggttcgagaaaggttgaaggctcgagcatgcaccaaaggtcgtccacttggaatttgactcctcgagctcggccgtccgagtgcagggctggttcaggtgctgctcccagctgaaagaagggaagtgggcaaaggcctgatagatgtgcgtatcgagaccaaagttttcccagccggcgccccactcttcggcggtgaagaagtagtctggtcgccaaggcaagaggcagcgagtcaggtcaagtcgggctcagttcgggcggaagccgttcaagacgcaccccagtttgcgatcggctgaaaagcgtcgtggatgacggccatgacgggcagagcgccctcgagcgtgtactcggctgcgcggacggcatcgtacgagcgcgtgtagaagttggctgaagggggcgcacagggacgccggtcagcttcttaaccaggcgagagctgggagggatgagcgcgcaccgagcgtgtcaaagtcgcagatgccgtcgccgagcatgggctcattgatgatctggacactgaggagaaagtcaaagtacgcgaatgagtggccggcaaccagggcctggggacgaccagaagcagacgcacgctttgacgacgccgccaaactcctccttcgtgacggcctcggtcatttttgcgacggcctcgacggcccggttgacgttggtcgagttgaagcagaactcgaccgaccccttccggcccgagttgtcgaagcctggacggttcgagggggagaggtcagcgatcgcacttacttgatgttaccgaaggactgaccgttctgcgagcctgggaccgagtgaaggtcgactgagagttggaggactcaatgtcagccgggcgctcagctctatcgagaaagcaacgcaccgatgacatccaggtcgtacgtcttggcccaccggaggccctgctgcaagtgatctgagggatcgagcggtggcttgattagccgttacccatctgtgtcgcgctgcgtaattgcggctgggcttaccgatctgcgtcgcgttgacgtagggctcatggtcctcaagcggaatgaacgaccagtagggcaccggaattcgtaccctgccgagcgcagcgaccagcgtcagcaagcagtccaagaagacccgacggagaaatgccctgagacgcacgtattaagccctctctgcgcaatctcccgaaagtcggcctcggtgatgtacgttgcaaagtgctcctcgagccggcgcgcacattcagccttgccaagcgcggcgcagtatgaccactcatcggcgatctcttgaccgtcgagcggagggacggcaaacatcgtgctctgcatccagttttcgagcacgaactgccggcgaggagcaagcgcaaggaggcagagcaggaagggggcgtcagttgagaaacgcgcctaagtcggtttgcgcgcgccaagactctctcgtccgctacgcacccatccgccgaggttgacgccccggatcttctcgccctgcgggtcggaaaacgccggcctgtcgcgagtcgacgtccagttgagccgggcggtcgtcgctggcggcaggaggaggaggctgctgaggacaagcgaggcgagcgagagcgggaggcgcagcatcgtggctgcgggagtggagggccggagggaggggctggttgcgggctgagcgtcctggagcaggtttgctggagagcgatgcgaggtagggtaagggccggttgaatcgtctcgaccgcaggctttgacgagatctctagtagacggggcaaggagcgaggctggaaaggaggtgacgacgaggcccaggtcgaactttagcacgcgtcctcgagctcgatatgcgccagagggacatcgagtcggacagacaatgaggtgaggagagtaacgaggggcgagcgcctgagccagtcaggtcgttcgagcgagagccggcagtcactagacgtagagtgcgagagcgggggcaacaggagtcgtgaacaaggtgagaggcgttccgaggcgacgacgcgacaaaggccgagcgagggcgaaacaacttgccgatgcatagacggacaaagaggcttggccgggtcatcgatccgcccctgctgctggtcgacaggagggagacggtcatcccatctgcgtcgactcgtcgtcggcctttgcccgctgacgaaccctcgctgtagagagatcgagcagcgctgagagtgccggcgacgagactcgctaggccgagggcgcccagcggtgcaggatggctcgaccgagccgccgttggcctgatcgtccttccggctcgtgtccggatcagcatcgacagtctgagcaactaagtcagcaccagcaggccggtcgtagaatggccgtcgggagggagcgtcgagctgtcggcctgtcgaggcacccccagcttcggatctcactcgcggcggaccgcgcagccgcccctcctgccttcgcccgcgaccgaccttcgacgcgccgctcgccgtcgacctcgacccgccttgcaacccctgctcctgcttcgacgctacacacagagactcgacccttctgccctccaaactcctccggtcccaccgcggccctctttctctcgctctcgcacacgctccgccaccgcccgccgtcgccactataagcgatggcggacgctccaccctctgcggccgccgctcgccacccgccaccggcgaatccctcgctcgctccagactatcaaccaagtccgtcttctcagcggcctcaggctggctccatgtcgacagcgcgcagctcggccctctcgcccaccagtggcggtggcggcagcagcaatcagacgcgcgctcaaccgcgccacaaggtcgtctttgatctcgtacgtcgttccttctcttgctcgactcgaggctgtcagccgaggctgacttcttgctcgctcttggacactccagcatctccagcatctcgcactctatgaccagcccgacggcccacggccactgcagccgcccttgctctggcaggcaagcgacgcacgaggctcactcaaagtctactactgcattcctctcgctaggaggaggattccagctgactctggcacgccctttcccccttttctctctcctgcagtttcggctgcggacccggagcccgccgagcgtctgcctcctgatggacgactcgtcgcacgagatgctcatcccgctttcgttcgtcacctcgctccgcatactcccaccgccggccagcgatatcttcgagagagagacgcctgcgacgggctgtgcgacggacgcggctcccgagggcgagagcgaggctgagatggagaagcggctcaggacgggcggtctcgtgctcgagctcggcgtcatgcgaggggtgcgtcgaccgctgtcttctgtccagctgtcatcgccgtcgtgactcaccagtgctttcgctttctgcctgcagtgtaagaaggactttcggctccggcagcccaactcatacgtgcgcctcgctgccgaaggcccgcccggcattccagaacgggctggcgagtcggaggccatcgacttcaccggagggttcgtctgcgtccggcccctcccgtttctcttcaccatgatcgctgacagacctcttgctttgacctcggatcagcgccgctcgcctgaccaacctgattcggctcaccgtcagtattcgccccgccgttccgcctcattcctgccggcctcctgatcccttcctctctctcctctgctttagatacacgccaccgtgacggccgaactctcacactcgatgacgtcgatcgtcatccgggcgctgcgtgtgcgcgacggccagctccctcagtccagctcgacagactactcgcccgcggcggctcgggcgctcaaagcgcaggagggcaacctatcagccgagggctacctcaagcacggctggcgctggcctgagcacgtcctgtcgccggaggacgacaaagatctggccaagcagcgaggagacgctcggtcgttcctctcgcaggcggcaacagcttctacgtttagtgccgacaccgtacggcaccagcgtccgcggtctccgcccctcctgacgacagagtcgcacctcgagctcatctcgtcgtcgtcgtcttcgttcgcgagcgaagggccgaccctcctgccgcctcaggcgccgccgactcctatgccggccggtcttctgccggccggtcttctgccgtcgaacctgctcgtcgacgagagttcgcctgagttctcgagtgcgcccgaccgactgccacatctgctcgacccgtactcgctcgctaccaatggccgtgacgacccggagcggacgcccgtcaaccggcgctttgacgcggccgaacagctcaacctcgcctaccagttccgacacccgtctgcgtatccgcccctagaccctccaacgccactccagacgtttccggcgaacggcccgccccagccaccgctgccttcgcatggccgctcgctctcgctcggcctcaacatggcgtcgccgccgccgcccctcggcccatcgtcggcgttctcgcaccaccgctcgatctcggccgactcggccccggcgatcgttccagacagctactgggagccgcgcacgcggcgctcgagcgtcgtctcgaacgcctggagcgatggcagcagcgcgggggcgtcggacgcgagtctgtcgtcggccgacctcgcgtacctgcttgacctcgcggccagctcaccggcacacgaatactgggcgccgatctacgacaaaacggttggcgccggcgccgatcgctttgcgactgctgaggtcggctcaagtggcttttacgacggcgctggcagtactggtctgcgtaacgccaacgccggcgagtcgcgcccgtcgtctggcacctggtcgctcggtctcgccgactcgctgcacggtctctcgctcggccctcctgcggcccagttggcctctcaccatcagagccggttcactccgctcgacaccagtgtcgttgaccctgccggcagcagtcggccggtgtccatggcgcagaccgactaccggacgccgactgagagcaacctcccggacgacccgtcctggcggccgcggcagaagagtgtcccgctcccaccgccgccgagcgccttgctccgcgctccgtcgtcggacggccaggagggcggtgcgcctcccgccacgctgcccttctacccagtcctctcctcgagccacagatggtgaagcggccgacgagcgagtttgcctctgcccatttgccacacaccacacaacgaaagtggcgcctgcccgtctctagcgcccgacccttttctcaacgatgtcacgacccactcttatggcccctcctccctaccctttgaccatgccgcctttgcctgcgtagctggccatcctcaaaggggagtccgtgcataggggtcgtcagggtcgtgaaagcaacaaagaggctgcccggggtcacttgtaccgtcactcgttgaggacaacaaagcgttcgaggccaaggactcgctcctccgactcccccgtaactccgagctcgacccacggccgccaaccgaggacgcgctggccgacgcggggcttaggccagcgcgagacggccggcgggagcgaggtcgagtgctcgtcgagccggaggagaacgtgtactttagcagcggccgagaaagtgggctcgctagcgtttgcgctcgggtacgagggcgacggcgacggtgaagaaccggaagaagctgggacgaggacggtcacctccggctccttctttaccgcttgacgggcgtgctcgcagacgagtgcgatacgtttgacgggcggcccagtcttctggaaggcaaacagcctgcgcgctggcacctgcgctgtcgtcattgtcgttgttagctgtgccgagtctgccgaggggatcgagacgatccggagctcgacgtccgcctgcgggagggcgtcgcgccgagcgaggagcgaacggtagaagcgcgtctgggcagcgtggtgcgaggtgagaaggagcgaggcggccgtttggaggttgcccttcaatctgctcgaggggcgaggggtggagcaggtcaggcgaggttccctcgtgttgcccgggcgacgctggagtcggctcttgcttgagacggactcacccgctcgttttgcggcccttatgtggactgacgcccagcagggcatcttccagcttcacgccccctggctcggcctcttcgccaccggccgccgcggaggctccttctgctgccgccgactcgcccatcgtcgacgtcgacgcttcaccctcctccttgatccgcggcttgccttgcgggatgtcgagcaggccgagcatgagttcgcgctcggccttgacgggcttggtctttgacggcgtcgcagcagcagcagcaggagggacgaccgatgagagggccatcgtccgtcggagggaccctgccttggcgccgcccgagctgccaaccggcccgccgccactgagcgacgtcgccagcatgagcggccgggtccgtttgagggcgggcgtcgtcctcgttcgtgacgacgacgaggctggcgagtcgtcttgcgcagcagcagcagcagcaagagggatcggcagccggccgaggatcgagccggtcgatagccgcggtcgcttactgggcaggtccgcctcatcctcgacgacgtcctcgggtagattcagcgggagctcgggcaggccagccgtctgctggcgagctggtgctcggggcttaggcgacggcttcgacgccgatgccgccttcccggcgaaggcgaacgacggcggtgcaacgcgcgagacgacgcctcggtcgtggtgcgctccctcgcggccttcacccttgtcggcgaccgagagaggcgagggaccgaacgtgctcgtcgtccagcgcggccgtttcgatgagctcggggtggcgtggctgctgctgctgctggttgtgccggctgcggtcggtgctgccggtcggtgaggctgtcaaggcggtcagcgatgtaagaatctcaatggatcgggtcccagcagcttcccaccttgtaatcgggacgatccgtcatcaggagacgctcaaggatgtgtcctggcagcgagcaggctggctggacggggtcatcgtccgctgtcgctaccatctctctcgtcgctgccgctcgacgctcttcgcgcgctcggccagcgccgccgtcattttcgactactggccgccttgatctcgacctcgtgcagcagctcgccctctcctctcagctcgcaaagaagaaaacgctatgtccgacctctcggcactccagcagatcctggcgggccttacctcggtcgacaatgcccaccgctcccagtgcgtcccgccctcttgtcgcttggccttcccctccctttgctgccaaactccgccgccctgggctgacctctcctcgccttatcttccgtcgctcttgcgcgctcctgtcctgcggtcacctcagggccgaggaggctctgaaccaggccatcgagcagtctcctgccggcgtcctggcggcactctctcagctgggcacgacctcgcccgaggcagccgtccgcagcttcgcgctcgtcctcctccgctcgctcgcgctcaagtcgccgccggcctcgctcggctcaaagagctcctcgctcgcaaacgccctctcgacgccacatctcgcactcgtccgccagccgctgctcggcgcgctcgagaccgaggccgactcgggtgtccgggccaagctcgcgagcgcgatcgccggcctcgctcaggccgcgctcgatgagaagcacctttgggccgagctcgggccggtcctgctccagatgacgcgcaacggccgggcagacgtccgggagacggttatgcgtatttgggaggattgcccggagctcgtgaaggaggaggacccgaacggcgtcaagggtgcgtccggcggcccctccccctatcctccctgcatgcgcaggccaagccatccatcaagacggcagctgatgatcgccctcttcacgccctcgcctaggcgtcttcatcgccgccctccaggatcccgagtcggtcgaggtccggatcgccgccttcaagggcgccatcagcttcctctgcgacgcgagctcgcaggtccgcaactcgagcggcgacttcatcgccagcatgctgaacgttggtcgcccccttttgccatgcgtaggtgatggactacccccactgaccgactggccgcgtccttgatcccctccaggtcctgccttcgctggcacccgacgcccaatgcacggcgctccagaacctgacgacactttcgtcgtcgtacccagagctcttcaagtcgcacctggcgaccttcctccccttcctcctgaccatctcgcacccgcctccgctgtcctcgccggccgaggccgacgagctcacgatcgacctcgacggccctgcccaggctgcgctcgagattgtgctcgagctcgccgactcgaagccggcgccgctccggcggctcgtgttcccctcgggcgagccctttatcaaggtcgccggtcggctctgcctcgagctgattgcgcggctgagtgacgacctcgacgactgggcggggagggacgcctgggaggatgaggaggatgctgaggaggaggaggaggagtggtcgcgctttggcgaggagggcctcgaccggctcgcccagggtctcggaggcaagacggtcctccctgccgtctggccggacgtcaaggcgctgctcgagggcgacagctggaagggcaagtacgccggactgatgtgcgtgcctcttcgtgccctcctagctcctgcatcattgtacccaggaaggctgactgccccaccatcgtcttgcatcgaccatcagggccatctcgagtattgccgagggcgttgcgaaagagatggagccgcagctcggcctcgtgctctcgcagattgcgacgctcgtcaacgacgagcacccgcgcgtccgctacgcgcttgtccactgcatcggccagctctgcaccgactttgaggtacgtcttgctgcttggtttgctcgctcactcgctgtatatcctgataattcgtccttggccgcatcagtatgttctcccccagacccacatcgaacaggttctgccgatcctcctgcacacgctctcgcacccaatcccgcgcgtccaggcccactcggcccgggctgtcgtcaacctctgcgacggcctctcgaacgagggcggcctcaacccgccgcacctcgacagcatcgtccagacgctcgtcggcgttctccaggccgacgcgactcaggagggcgtcaaagcgcaaatcattacgagtctggcgaccgtcgcgaatgctgctggcgagggctttggccgcttctatggcgagctcatgcccgtcctgatttcagtgctcgaccgaggagtcggcgagccggtcgttcctaggtcggacggcgagggctcgctcggtgtcgaggagcgccgcaagcggctgatgaaggcaaaggtgctcgagtgctgcggtctgatgggtgcgtctctccgtccccggtcggcagtcgtcccgcctctgaacactcaacggacccttatgcctgtcgccgccaggtctcgccgtcgggtccgacatgttccgcgcggacgccattcggctggccgagctcatggtccgcatgcaaagtgcgtcgagccactcctgagcaaagttgatcgctttgagcattggatctgatcgcttctttcgaccagacgggatcatcggcgacgatgacccgcagatctcgtacttgcttctatgtgcgtctggtctttctccttctctcagcctcatcgcaggctgacgtcctcttctctttgagcagcctggggcaagatctgcgaagcgctcggccaggactttgcgccttacctgcctctcgtcatgcccgacctgctcaagtcggcaagcttgacgccagacgtctcattcgtcggtggtgcgtccatgctgcctttcgctcgctcacatcttagaacggactcgtgctgatatggaggtcggatgctgcagacgacgaggaggagtcgccggccggctgggacaacatcgttgacatcggcggcacggtcggtcgccctctttccgtcccttccctgcatttcgggcctaattttatcgacgactcactgtcgctcacagaatgttggaattaagacgtcgtctatcgagcagacgtcgaacgccttccacctgctcgtcacctacacctcgagtgagtgcaaaggccagctgactacgcaccgatcgttcccggactgaccacgcttcgcttcctgctagtcctcggcggcctcttccagccatacatggaggagacactgaacctgtcgcttaagaacctgtcgttcttttttgacgactcggtccgcgagtcggcttccatgtgcgcttcatcgtccgctcagctcaaacacctgactctcgcactgacactcctctcactcttcccgctagcatcattccgatcctgatgaagacggccaaggataatggaatggtgacggagggcctcgtgaccgaggtgtttgacaagctcctgaccgcgctcgccgccgaggccgatgcctccattctctcggtgcgcgccttcctgacgtgacgaagcgcgactccaagctgacagccactcctttcgcgggttcactcggacgcagtacttcctgtgagtcctcgcagcagccgagcgcccagcggcgacctcggggaggcccctcagcggtgcccagaccggtcgcggtcctttctgccgcttgcaatgctgactcccatcccctgtgaatcgggttcgtcaggaaatcggtctctgactgtgcgttttgcgtggctcagactcgcgaatgattggcggcggcggcgggcgactcttgactcggcgcgcgcgggcgccgactcgggtcgagcctcggctgacccctttctttttcacgtgtctcgccttccctccggcaggcatccgcgtcctcgagccggccaacttccctccgtcggcgcgcgaggtcctgaagaaggcgtgcgagagccaggtcgtcgacattgcggaccggcgcaagcttcgggcagagaggagtcaggagtgggacgaggaggaccgcgaagaggcctacgaagtcagctgctttatctgcttgcccgcccccatctcaccgccgccttgtttcttcgccgctgacgatccttctgtgcctctaagctcgagcgggaagagacgatcgcaatcaaccagatggcgagcgcgctcatccagcttgaccccaacgacccgctgctcgtgacgctgtcgagcgtcaaggacctcggcatggccccttcggaagagtggtcagacgaggaggacgaggcctgagcttatgacggcatgtctagacgagcaggatgcatgctcatgtttttgaggctaaggtcctgaggctaggtgcagacgagtcgctcgccgccgccgcgaaaggcctttgtcaggctcagcacagccgagagcaccatgacgagcaggccaaagctcgcgcaggcccaggccggcagctttgtccgcgaccatctgggcgcgtccgagagcttgaggaagcaggccgcggggaacttcgggagacgcaggcgggctccagtcagggacgaagaacgagaaagggctgcagatgagagcaggaggacagacgatgaaggcgaggacggtcgctgacaagcctcccgttagctcgaggacaataccgaggtctgcggaggggtagaaacaggcgaggtgtcagcggccgaagaatgagggaaagccgccgacagggacgcgacaaaccgcaggtgagcaacgagatggtcatcgtcgagaagacgatcgcggtcgtgacgatgtagtgccgcttttgtgagaagggctcgtcgggatagaagtagctctcgataacctgtcggcgagtgggggctcggctcagcgaacgtcgtgcagagagaacgggccaggatggcaggggcatacctcgcggcaaacgaaggcctcgagcggcagcgttgtgaacctgaggtttttcaatgagacgactcagcaacgctgcaaagggcgttcagaaaagaaagaacagggcgcacatgttgaggccaaagcagagccgggcgatattgatcagaaggtcggcctgcgggaagttgttgaggatgttggcctgcgtcttgtctgtaaagacgaggaaccccgagagggccatcgtgaggcacatgaggagcgaggcggctgtgctgatgtgggtgatctgggcgaagcggtctgcagagcggcggtctgtgatcagcgctgcaaaatgtctgacaggcgacagcgacgatggcgcaccgagtgtcggcgtctgaagcgagccgtaaatgaggagcgagttgtgatggcagacgaaggcgaaagagatgacgccgatggcctcaaatacgcgtggctggatgatggtgaagcgggcgctgtcgctccccttgagcgagtcgtcgacgcgcgagccctcgatcaggaccgagcagacgatgacgagcatcccgaccagcgctggagaggtgaacacatgtcagcggacagaagaggaacagatcctgtaggcaaagctgagccctaccaatgcccgacgccttcgagagcttggagatgtcgcgatggagcgacagcgggtacgagacggtgaccgtcgcgaggaaaatgacaaacatccggttcgtcaagagcgagagaacggggatgccctcgaggaacggaaagacgaaagcgaggacgtgcgggatcgtgtcgccgatgataacgccgaaggcggccatgccgccaaacgcaaacgcaaactgaaagaaggagacgcccgcccggccatactcgccaaagcagtggcccataatctagcgaaaggggagagctgtccgttagagtcagcggccccttggcattatgcagcaaaagagacagacgtcgatgtatgagttgcggcctgagagcttagcattcaggacgatcagccggatcgtccagtcggtcacgaggcagagagcgacgagcagaaagaggcccgtaaagaagccggcgccggcgacggcgtaaggcaggcctgggcgagttgcgagacgtcaggtcagtaactggggatatgctcgagctgcgcgcgccagccttggaccgaccaatgatgcctgtgagcggggaagcgtcgagaaatcagcgccaactatgcacgggtctggcgacaccgcaggagcaggacggaccggcgccgaggatagagtttgccctggcgagaagaggaagcacagcgcgtcagggtcggggtcagccctcatcgcggccaagagagagagatgggaggttcccggccgcctgcgcgcgcccttcagcgggggacgtggctcacatgttggcgatgccgctgaccatcccgccgcccttcttgagccattcaggcgcgtcatcaccgacgagcgccgccagagcgccgccgccgccgttctctcggccgtgctggtcttcgagcgcgccgtgtacgaggtcgtgactgcgccgcgagaggagcccgaccaagagcggcgccgacgtcgacgcattgatggtcgccgacgagctgtttgacaagtggtcgagctcctcatcgtcgagctcgtactctggacggccgagaagggtgtcagcatcgtgccggaggttgtaggagacgcgtgtcgtcgtacgcaccgagctctcgcgactggaccgtgctcctcagccctgcgccgtacattgggctcacactcctcagctcgagcgactcgccgcctacggctagcacattggcatcgtcgctgtaaggcgcaacgtagccgccgccggctgctggctggcgagagctccccgtcgagcttcgggtcgagaggataggccgcgacgacgagagcagtgccgcgctgggcccgcgcgaggtcgtcggcgtgtgctcgtcatcttcctcgtcgtcgagcgagaagaatgtcgtcgaggtgtcgagcaagggtagccgggcggcggacatcgttcagagggagttcgcgggcagtctatggcatgtaggggagctttgaagatggccgttcggaggggcagctcggctcggctcgcaagccgaaagagctcgagacgaaaggcggggccggcgacagcgttctcctgcaacgacgactctcctcgctctcaacgaccatggccagctcctcaatcccttcgacctcggcccggtaccagacatacgaggcccgactgccgctgcactcgaacccgtcctcgcgggcgctgctcgagacggtcatccgcaagcggtcgaacctgtcggtctcggtcgacgtgacgaccaagaaggagctgctcgagattgtcgaggccgtcggcgagtttgtcgtctgtgtcaaggtccgtccgtcgcaccgacaggaggcagcgggcaggcgagagaacacggcgggaggagcacatgaggctggcgagcgtgcaggtaggcctctcctcgctcgcgggacaagtgctgacgactggttcacctctctcgcagacgcactgcgacattgtcgatgactgggaccaggacctcgttgaccagctgacggcgctcagcaagaagctcgatttccagatctttgaggaccgcaagtttgccgacatcggtgcgtgtcggcccactccgaccctgctgttgagctgatgatggctgacccccgcttccactccgcctcggcgcaggcaacacggtccagctgcagtattcgtctggtcactacaagattgcgtcgtgggcgcacatgacgaacgcccacccgctgccggggcctggcatcgtctctggcctggcctcggtcggcctcccgctcggccggtcgcttatcctcctcgctcagatgagcagcgccggcatgctcgcgacgggcgagtacacaaaggaggctgtccggatggcggccgccaacccggatttcgtcgtcggcttcatcgcccagtcgcgggttgaggagctcctcccggccgaggagattgcttcgctcctacccgaaggccgccagacgtccgacttcctcattctaacgcccggcatcggcctcgcaaaggccggcgataagctcggccagcagtaccgctcgccccagcaggtcgtcggcgaggacggctgcgacatcatcatcgtcggccgcggcatctatggcggcgccggccgggacgagtggcggcgcgaggccgagcgctaccgggccgagggctggaaggcatacgaggaacggattcgcaaggactgaggagatgcatgcgtctataaaggaacaaccgagggagcgaggcgaagggctgtcgcctgtgcagggcagaggagggcaggacgtgggctgaatgcgcagcgcccgaacccacggggtcgaccgtgtcagcctccgcctctccgtacgagtcttcttgcgagtgatttctgcgttgctgtccggtgcaccctcggctactcacgatccggcctgcaattggcgggacgtcaggtcgagcggagcgactactcctcttcttcaggccagatcggcttcggccgtcgtctcactcccaacaccgacgcctcatccaagccgcgacttctccttgcctcacccttacctcaactaggcagactctcattgaacggaagcgcctctctccttataaccctcccgcctatccagcatgtcctctgttccgccagagcagctccggtcgaagctcgagggcgcgctcatgtcggtccggcacatcgtccgtcggctcttcttcccctgctcacctctcccgcacgcctgacccgataagcttcatctcattgcgacttgcaggagatcctcgactcgagcagcggctgcggcaagagctactcgatcgtcgttgtctcggacgactttgagggcctcaacacgctcaagcggaaccggctcagtacggcgtcgcctcgagttgctgaccgattagacctgctgacgctcggcttatctaccttcgggcctgatcgtcgcagtcaactcgatactgtcagaagagattgccgaacttcacgccttctcgcaggtgcgctttgccatgactgccctgatgctaaatgacctgcggacgaccccgagctgaccaagagctcggccgccgttcagaaaacgctcacgggcgcccagtttgatgctcagggcggcaacgtcaagccgaatgcatagagcatagcgacggaaaggataccttgtgcgtctggctcgggtcggcgtgccatgggctgccggaggctgccgctgaacttcgttcttgaccgccactgcgctcgtccattagcatgacgattcgactaagccccacctccgcgacacgaaacccagcgggcacctcgccagctacacctcgagcgccccgggcgcacagtctcgcacatgaacggaaacgtgcatacatgaggggctcgatcgagagagacagagagagagagtggagttgcgaagcagtgctgcggagagggacggcattagaggcaaagacaggacgagaaagaggggagatgcaaggggggtcgtgaagggcgggcgggcaggccaaggccgggaggatgtggaccgcggcggcggtcatgctgaaggagctggatgaagggcgacggcaggctgctgctaagggcaaaggtaaggctcgggcgttcgatctgtcggcgcaggaggttgacgacctctcgtccagcgtgagtgtctccatccttcgtgtacgtacccagcagctgctgacgctggccttctccacctgtggaccagtcgtactcggtcactgcgcgcgaacaggtcgacattcagcacgcgctggcacccagcctggctgaaggctctgtcgatccgatcggcatagacgccgacaacaatgacgaggatctcatgcaggccatagcgctcagcctgcaacagccgcaggcggctgttggtgagccgagcgggctgaggaccaaggagaaagaggataccaaggtaagtcgtcgataacgctcgtgagtctctcgccgtcacacggactgacattggctccttcgcgcgttgccgcagtctgagagcgtctgggccggaccagcgcccgtgatggcggccgagggtgcgcctcgcaaacgggcccctccgccgcatcgtcctctctcgccgcacgcaactggcacgtcgaccgctgcctacctgaccgagtcgccgaccgcaaccagcgtcgcaaagcgcccgcgactctccagcccgcaagcgacccccaccggctccgccttaacagcgccttcctcgattgcgctcgtcccggctcacctccagaccgaccgcttcgcccgtcggccccggcgccaatcgaccctgtttttctcgtcctccagccaaccgctgccaccgccgccttcctcgtcgacccccacctctagcagcggcatcgtcgcgccaacagcggcgatgtcggacgacggcgacgagcccgacgcgacacgccgacagcgagcacgtgaggccttggtcgagagcccgaacggcgagacgcttcgccgtaagggagaggccgtgtcgagggccggcgagcggtgactctctcgcgcgcgcgcgactactgtagcaactaggcgacggtgggcgcacgcctgctttggctcgaccctccttgtatcgacttcgcttcttcgtcctggctccctatcgacctgactttcctgcctcgcccgtccttaattaaggcatgacgcgtcacgcgcagcccgcaatcttttcggagccggccgacgacggcccaagacgagcgcgcgactgcttgcccgagcctctaccttgaataaagacgttgtagaccagcactatccgctgctcgtcgtacgcctcgtaagggaccctcgacctttgttcgcggcgtctgcttcttaccggggccgatgacgcctctcttaccggccggtgcgtcgactctatttccggacggagcccctcgggctgaatcttcccccccttccccttgccagcttgacctgctttcgctgccaacgcccaccaaacccacgcctctgccctttgagctccgggaccatgtcgacctcacccacgctctcgtcgctcgacgaaaagaagaagctcgcggcggcttggatccggccagaggaccgcgagacgatcgcccccgtcggcggcgtcaagcaggagcggctgatcgaggatggccaagacgatgaggacagctcgctaaacgtccagatctcggagcggtccatgtcctggcctcgcacggcagtcctgctcttctcagagtacatagtgttgggttcgtttcgtctcgcttccccggctgccgcctctctgctgctcggaactcaccttccgtcccgccctccgcagccattcttgccttccccagctcgttcgccatcctcggcatggccggcggtgtcatctgcaccatcgtcgtcgggctctcggttctctacacgtcgcacgtcctctggcgcttctgcttggcgtgagttgatttgctgccgggcatcgggtctacctagcgctggcgctgactgcgaccccttcattagctacccgcaatgccgcgacattgccgacgttgcctactggatctttggcgaaaagcgatacatttggtacgcggcttttacgggccttgcgcttgtgagtctcttcttgtgctcgtcgtcgcgcttcaacccggactcagcgcctgatcctccacctttgctcgccatcttcggtcgccacctctagaacaacatcttcatcatgggcctgcatgcgaatgcaggcgctacagccattaatacgctcggctacacgacgtgcacaaccgtttggggcgtcgtcctggtcgtcatcatgtggtgcgtgcgcgattcgcctgacttgctcgattgcgccttggcctgacctctacttctacttgtagggccggctccctgcagagagacatgcggcatacgacgatcctcggcatcttcaggtgtgtgcgactgcgtgcgacaagtcgagcggccagtgctgatcgaagcctgctttttgcgctctcagcgccggcacaatgttcatctgcttgtgcgtctttcgaccctgatcgctccagtgccatgagctgacaaacccccatgttcgtcccatagcctgatcgttgtcatcggccacggtgtccagggcaagccaaacggttacgtctcggctgctgaggcgaccgctgcgtcgccggagacgtccctgtcctggaccgtctgggcgccagaggggacgacgtggacgagcgggatgagcgccatgctgaacattgcctgtacgtcctggagacgaagacggtttcttcccagcgcgactgtcgctaacctttagctcgctctctgccctaaagacaccttcatcgtacgtacgcgcaaggctggctaaagcgacggcttctctccccatacttcccgttgctgagcactcgatggcgctattgcagggtcaagccctcattccgagctttgtcgtacgtccgcctttagcctcgaagaaaggttcgatcggtgctgactagttcgtctgcgcttcacccgcagggcgagatgcacacaccagaggatttccccaaggcgctctatctgtcaatggccgtaagtcggctgcggtctcgccgctgaagatccgtggcagccaatgctgatgtagatgtctccctcaggccgagctccttctcttcacaatctgcggcgccgtcgtttatgcctacgttgggacggaactcacgaccgcgccagcctacggctcgctcatcgccaagtatggccgaccggcagccgcgttcaccttggtgcgttcgaagcacttgctgcagaacgagcgccactgtcgctgacccgtcatccgaatcctctcgatttgaagccgaccatcatcataggtgcgccgaaccgagggctgggtccgagatgaggttggtcgtctcggctgaccctttgggcaccgtcatcctcgcagtcggcgttatctattcgctcgtcacatcacgtgccttattctttcagatcttcagcgaaaagtcgcctcaccgccggacgcacacggtcaagggctggttggtctggctcgcgatcgtcaccggcggctggatccttgccttcgtcatcggagagtcgatcccgttcttcaacgagtgcgtctgccggaccgattggtcgcagagagctgtcgctgacacgtgccccgtctgtcttcagcctgctatccctcatctcgtcgctttttgacagctggtttgggtgcgttcgcgtcgtacttccccctccgagggcgagagctgactgaccggtcgacgcttcatcccttctagttacgtgttctgggcgatggcgtgcatactcttactcgccttgaatcagctctgggtcagtgctgacatctcctgactctgctcacagctaccgtcttctctacaagggtcgttactttgagagcaagctccgcggcatcgagacggtcacaaacgttgtcatactcgtcgtcggtctctacattttcgtcgctggaaccgtgggttcgatccagtccatcaaaaactcgtacgcagaaggcgccatcaagacacccttcagctgcgtcaacagcggcttcctcttcacccgatgaaggtccctactctcatcccctccaccccctctcatctttcgtgctctttgtgtactttcgctcagcctcctcctgtagcatcagctcttagatcgcgtcgcatgaccctttctcggacaggcagtggctcggcgcaagcagagcagggtgaaagcacgccccttgctcccagccgtcgcatggcagccgcaacccaacaaccgggccatggtgaggcggccgggacgcatgatcgcgacggagggtcagagcagcgagcatctgattagtcgtcgcggacgttgtgcgggtcgtacccccgcggcgccgaccgccgcgctcctccatcgtcctttctcgacatcggttgcgaccgcggcttgagtcgcttcgagtccatcttcaacttggacgctgggtctggcatccagggcttgcgcgactgcgatgcagatgcggcgtcctcaacatcgcccgcacccgccgctgctccggctgtggccgctctctgcttatcggcccacgcgctgtggttgcgagcagcggtgaaggagtgattggcaagctgtgacagggaggggtatgtttgatcagtgggagcacgctgaaagctgcttgaatgaagaagaggggaccgaccgcgacgtttatcggcttcccttccttcttctccttgcccgccttctccttcgcgatcatgtcgagcgtcgacaggtctgatcccgcggcgagagcctgctgcgcgagctcgcgcgaagcaaagcgaacaaaggcgaagccgaggctatcgttagagagaccgacgcgcgcgtacttgggtatttggcgccgctggccctcccagcctttctcgccccacttcttcttgcacagttgccggtagagatagatctggaagagggcgccctcgggaccggccgggtacgagtagatcatttcggtctgttcgagaggtacaaggcggccggggaggacagcaaccgcagcggcgggtgcagacggctgcgagtcgaccagggaagcgggcgaggcgtcgatcgccgacgaagaggcctccttgacgggagtcttgctttcgaccgcagcagtctcctcggcagggctctcgttgacggccgtctcgtccgcaggctcagcctcggcagacgctttggctccagcgctggcggtcggctccggcgtctcgaccggctcaacggcagcctcgatgacggtctcggacgcgccgccttcagctgcggtttcggccgagaccaggtcaggcagaggctccgtttctgcggcagcgtccggaccggtgtttgagggagattccgagactggtgtaggcgcattagggtcttggaggaacggcatcttccggataagggactttgaaaagcgcttgacactcagactcttcggaatgtcgaagatcttgggaggaagttggatgagaccgtcagaataacgagccgaagattgcggcaggcgaaaaaccattgcacttacgatgagagttcgtgcctgttcgtcgagctcctcctcgggcgtccgaccaccgagcgcaacctccatcttttgtttgtcgtcgagcgtggcgatcaaattcttgacgggtgtcgacacgggcgggcgggcgggcttctcccaaagacggttaacggcaggttgacgctcgcttcggtcccggatggaagccgggcgctcatcgcggtcgcgaccctgagccgggcgggcctcacgctcccgagtgaaggccggccgagagtcgccatcacgggtgtaggccggccgagcctcgcggtcgcgggcgtaggcaggccggtcgctgccttcacggccgtaggcaggccgagactcgtcgttgcggctgtaggcaggtcgctggtcctccctgtcacggccgtaggaaggccgagcctcgcgcgcgcgcggcgagtacgccggccggtcctcgcgctcacggccgtaaggtgcgcggccctcgtcaaaaggcgcgcggctgcggccatcgtacggcgtacggctctcgccgtacggtgcacggctctcgccgtacgagttgcgcgcaggcgacttgtcctcgcgatcgcgcggcacatacgatgggcgacggtcggcgtcgtcgtcgtcaaagcgccgaggaggcggcccgcggtcgtcccgaccgtaggacactggccgcccgtcaaagtcgtcgtcaaacaaccggcgccggggcgagagcgagtcatcaggccgatagcgaggcgcgggccgattggcgtcgtcgaaccgccgccggggtggcgacgcgtcttcgtccatgccaaagcgcgaccacatccggcgaggcggctcgtagtctggtcgtctggcataagacggctctcgccggtcgtcatcctccaagcgccgacgaggagcggtctcctctgagcgcgggccacggctggcgccgaacactcgaggtgactcgtcgacggccgagctccggtagcggctctcagtcagagcgttccggccggcagggccgccatagccggctgaacggtcagagttggaggcctcccgagcggccttaatgcgagctttgttcgcctcgaacttgtcgatccgccagcgctcctggttgttcggcctcggcgcgaagtcggcgccggctgaggcgaacctcagcgacgacgaaggcgacggcgacgacgcgacctgtcgctcggagacgttggccaggagctcgtcaaagtttggaggagagttggccgaggagccgccaggaaggcggcgggcgagggccgccgccgaggtcgagagggaccggacgagcagcgacgaggcggaagggaaggctgagcgcgcggccggttgcggctggcggaggacggcgcttatccgcagggagcgcgagagcgcgaggcaggtcgacatgcggccggataaagggtgctgtgcggacagcgaaagcaggtgcccgaggggttgaaagaagggagtgggagagagagagaggaggacgactggcgggacgaaatgtcaaagccgcgaagctcgcgcagcagggcgagtaatcagttgtccgacctgtgaaacccagcctcgcaaacccccgtcgccttactcgctctgcttgcatagattcagttcagacagaaaaagctgccgcacgacgccgactgacagcttgcgacccagcgagcgttacgtcactgacagccatgaagttcgaacccagagccgaacgtctacgtctcttgtgcttctaccttctcagtgcatgctgagcacgagccgctcaaactcgcgccggaagacatcggttccgggcgtcttggtgaggatctcgatgcccttgggcttaccggcgggcccgtcggcaacggcctcctccttgggctccgcagcgtggccgttcgacttgacgatgccctgcttcgagcggtcctcgaggagcgtctcctcggtgcctctgcgagggaagaagagagcgaagctcatagtcagctttggaggtcggacacaagtggagtcgagagggggcgcaccgccggtcaacgacgcagaggccgcgcgtgagctcgccgatccgctcgacggcgaagaagcggcgggtcgtctcgaagccgttggcgctgttgccgtccgtgccggcgaggccaatcgcgtaccagacgaccctacgagtgaggaagacagcatagtcagtggggtgcaaaagcgagaacagtgggacagaggacgcacatcgggtcgtgcatctccatcgcgtcgccgaggccgaggctctcgtagatgccccggacgcggccgaggaacgccacgacaaagtcgagcagcgggctctttccccgcgcgctctggtcacgcatcaggaccgggaacggcaccgcatgaggcgtcgtgatgtcgagcgggcagacgacaatgttgacggcctcggacggcgggagcgaaaagaggtgggcgccggcgtaggggtcggcgaagaggttgaactcggcgcaaggggtcgtgttgcccgggacgtcgatggcggcgcccatccagaggacgcgcttagcgcgcgaaaagacggctgggttgagtttgtgagcggtcgcgacgttggtcactggcagcgaggcgggctgatcaacgtcagcctgctgacctgcctgccgtgctgcgctcctaggccgaagctaacgaagcacccctctggaagcggaagggacgcacgaggaccaagcgcaatgacggtgaccgagccagcctcctctttctcgagcacgtcgagcatgagctcggccgacgtcaggctcgactcgatcgagagcgccttgggcgtgtagtcgtcggcgacgtcgtactccgggtgcgtctcggagatgccagagagaccatcccggccgtgctgcagacggtcggaaggaaaagatgcccgtccggttagctcatgggctctctttcagacgcaaaggcactttcaaccaggggacgcacgaagtaggcggcggtgtgagcctcgccctcaaccggaatctcggcccccttgctggcaacgcggatcttgctcgcgttcggcccgagtccaggccagcgcttggcccagtcgccgtcaaaggcagcctgctcggtctcgagtaccttgaagagcttgcggatgttggtcgagacatgggcgcagtcggtgttgccaaacgtcggcgtcagggcggcaatggagagagtcggcgaagcgagggcgaggagaagggcgagcgcgtcgtccacgccgacgtcgctggagaaagacaaaccggtaagagaaggcgagagggtgacagagagccggcccgagcacgacggaggggttagggcgagacgggcatccggacaagggaaggggcaggcagggagcgagggagagaggtgtcagcgcaagcttaccgggagggacgccgtccgctgcgagagagacgcacacgtcgagaatgacacggttggacgacatgctgaggggagaggcgaggaggtagggtgactggatgaggacgaggaaaggaagatggtggttgggaggcagcaagctggtcaggctggagagggcgggcgagtcggggccgtcgtcgctccctccgacgccgcgggctgcgagccgccggcttcctccgacgctccggagtgtctgaccttagcttacacgcttgcctaagctgcgtaactgctgttacgcagacgccattgactcgacttgcgccttggccctgcgtttcggccgacggagttggctgggcgtcgtccgctgctctctttcgcgctgcagctccttccctcctgtaccccctctgcctcaaccccgtcctcaacccacacatcaccccgctcatggccgagtctccggagcagctcgtcggcaaccccgcccagggcggctgggtcgtccaaaagtacggcggcacctcggtcggcaagttcctgcacgacatcactggccagatcatcccgtaaggcccctgctttcttcttcctgccctgccttgctagtcgtcgaggccgggtgtttgactactgtcgttctcctcccctccgccaacgcctgtcgtcgtcgccgccgccccgccttccttgttcactcacaactgctcgccgcctgcacccgcctgcacgcacctcaaccgctcgccctcgtaaacccggtcgctcccgcccttgctcgcttgcaggtcctacctggctcaacacaaggtcgtcgtcgtctgctcggctcgatcaggcacgaccaaatcaaacggcacgaccaaccttttgctgaaggcagcggccgaggccaggcatcggccgaaccctgccaatacgcgtacgcccggcggcggtctgactcgcaacggctcgggcttcttcagcccccagccggcagcgacgacgcccaagaacgggccgtcagccgagctcgctactctgcccgacaagctcgaccgcctccgctcgctctcgtccggcggccactcgcgcgcatcgtcgccgtcgccgtttgtcccgctgagctcgtgcacgccgacgccgtcgtcgctttcgtcgtcgctctcgtccctcccggccgtctcggcgcccgcggcggccgctgccgcgcaggaggacgaaacgcccgacttcaaccggaccgtcgaccagatccgggacgaccacttcgagtctgctcgaggcgccgtcaaggacgagggcctgctcgaggagctcctggctgagattgagcgcgactgcgaggggcttcgcagcttcctttacgccgcccaggtgcgtcgctggctgctttccttgtccgtcttcagcctctgttgacctgtcccctgcactaccatagatcatcgacgagatctcggaccgctcccgcgactcgatcatcggcattggcgagcggctctcgtgcaagattgtcgccgcggccctgcgcgataagggcgtcgactcggagctcgtctcgttcgagcacattgtccaagcgacgctctcggatgaggaggagctctcgctcgagggccgcgaggacgagctcgaggagttcacgctcgaccaggccttttacgaccgactcagccgcaagatgggcgatcgcttgcgcgagtgtggctcgcgcgtccccgtcgtcactggtccgtccctcaagctttctccgtatgcggactcgcgctgacgcttgctgccgctccttgatctgccgcgctgtcaggctactttggcgtcgtgcccggctcgctgctcaagcaggtcggtcgcggctacaccgacctgtgcgcggccctctgcgcagtcggcctcgcggcggccgagcttcaaatctggaaggaggtagacggcatcttctcggccgaccctcgcaaggtcccgacggcccggctcatcccttccatcacgcccgacgaggcggccgagctcacctactacggcagcgaggtcatccacccgttcacgatggagcaggtcatccgggccgagattccgatccggattaagaatgtcgagaacccgagcggcggcgggaccgtcatctaccctcagtcggactcgcccgtcgcctcgatcgacggcgtcgagcagctccggccggtcaagcgcttcccgcagcaccttccgacggcggtgaccatcaaggactcgatcgtcatcatcaacatccactcgaaccggaagaccatttcgcacggcttcctcgctcgcatctttggcacgctcgacaagttcggcgtcatcgtcgacctgatctcgacgagcgaggtccacgtctcgatggccatccacgcaagcctcatgcggcgcgacatcgacaagatggtcaaggagcttcgcaagagcggaaccgtcaccgtcctcaaggacatggcgattctctcgctcgttggccggcttcaaaacatggtcggcatctctggtcgcatgttcacgacgctcgccgaaggcaacgtcaacattgagatgatcagccagggcgcatccgagatcaatatctcgtgtggtgcgtgctcttgctcgtctcgtcgcgcgcacgcattcaccctggactaaccgttcgacctctcgcctgcagtcatcgaggagaaggatgccgtcaaagcgctcaacctcgtccaccggagctgtctttcgatccctccggccggcatgtgagcccaacctacccgtctgctcgccgctggttccaaccccagcacgcttgcttcctgctcgctccgcattttcgaagaagggctccccccgtctcacgcacgcacactcgctgcgtcgtgcagtttttagaccgggctcttttctgttccctctcctgcctcactgtcgtctctcgcttctcgctcttgcacgccgccgtccaaccgtcgccccctttcccacccgcctgaaactgtctcccgtacccctcctctgttggaaactatcccctctctcatgtgcttctaacgatcgatgcatcgcttcccgtctacctgcccacgtctctcgtctgcccgcccacttcgagctcagcctctactggaggtcgagggcttgcaccctaggcgattctggccccgaaggaattcggaggcaacgacgctcggaggagagcgtgcgtctcggcgtgccggtgacggcgggcagcttgctccctgacctcgctacccacctcgaccccagctcgcccccacacgacctctcaagcatgcgcctcacgctccctactcggtccttcctctcgtccctgctcccaggcgcccggacaggcacggcgatctcgcggaccgagacgggtggcctcgtccagtggaagccgagaatacaagcgggcccggacgattacccacagccgaagacgcaggtgcgttccctcgcaccctctcctgctgctggcctgtcgagaggcctcttgcgtgcactcgcggtatggcggagctttggcaacggatagccacccttatgctcgcctcaatggctgacgtcctgcttggcacccgaccgatccatcagaaattcgactacgaggtccgtccgtctcttctgccgacatgatgggctgccgcctgaccagcctagctctggctgtgtctactgcctgatcaccgcaccgagctcttgtagcgcggcggtcgatccttcgctcatcggggagggctgatcagcgccggctctgctcgttcctcccacgccctcgacccaaccgtagagcatgccgcccgacccgccgaccaagaaattcaagtcgctgttcgtcggcgtctcgtcggtcgtcatcggcttcggcctgcctgtctggatcatatactcccaggtgtcagtcgctcgttccccgcggctgcagctcccagctagctaaccccatcaccgtgcctgcacgctcgacatccgcagcctgcttcggcagaataaggagcgcgcccaggagtttgtcgagacgctccccatcgacgacgaggtgcttcgccgggccgagattgcgctcgcaaagaaggccgagcaggaggaggctctccggcggaggcgcgagggcggcctgtacgagcctcgtaagccggtggcaccggtcgtctgaggttcgagctccctgcgcgcgcgcccagcgacgtcgccgcctccgaatcccaacggatcattccggcggcgagtaacgactttcacgaacagcacgaaaccatcttgcacctaggatgaggggctcgaccgagcagtacgtcgctggccggctcaatctcagcttttagttacttttgctgatcctcggccttctctgatgccttcgaccgcagaagcgcgtttctccctttatcgcatgcacacgtacgtcctctgccgtgctctgcgcctccggagcgcctggcggactcaccgcgctctcctacctcattcaacgtcgcatgaccgcctgcactcctctgcagatcccttattaggcttcctgtctgttcgcttgcgctcgtcaaacggtgcgttgctgttggtcaggactgtggaccaacacaagggtcgtcgctgacgtctcgacccgcccgacccttcccttgatcgacaggctctgctgagggttcgtcctcccctcttgagttgcttcttggccggtcaggactgacgtgaggctccctatctgcaccatcggcgcaggcatccggcccgagtgaaggtcattgacgctgaccaagagacagaaagctatgagcagcgcgcgagctctcgtcgtgtgcacatccgggccccgactcgcggcgacgccagccgacgcgtgaggttgagacgacagcaggcaaacatccgcaaggaagaaaggggcgagggcttgagcttgacgtttgagcttctcgcgcgcgctggccgactggctggctgggctggctggctggcggggcgggcgcgcgcggagggaaaaccttcgcgcgggtcggccggagcgcgagccctgccacaacagcactccccctgcgtccctggcgtcctccttcccttctctgcaagcaagtcggcctcgctctggccgccatcgtctgcctgccggtcccatccacctgctcctgccggccgatccgacgccttcgacactgggcggatgttgaagtcgagccggcggcaggcccgcttgaccaacaagacccgactctcggtcagccggggcgagctcgacggctcagaggtcgtcatcctcgaggacgaatactccaagggcaacctcaatcaagacggcgtcgagaagggcgaggaccaaggtacgttttccgtcccatccgagccctgctcgaggcggccgatctcgcgctacgagcctccctttcccgacctcctctcctctcttccaccatgtctcgtgccgcgcgcgcgcgcgcgttgaaaaagtcggaggcaaaccagcccgaccatctcctgtctcgatgctctcgtcgtccaacacggggctgattgtccttctctcctcctcttccttgcctcagaacaccacctccaggccgctatctcagcggcagccatccgggctgcggcaacgcgctcgggtagcggcggcggtggtggctcgaacggcggctcgcctgcgccagcctcggctggaggctcgacgacgcccgtgacaggcggcaacgccaggtcatcgacgacgaacctcaagccgccgcctccgatcgaggagaaggcgtaccatatcccgacgccggacgcgaccggcatcgtcggcaactatgcagccctctacccgcgcaaccagtggcaagacccgtcggcctacgtccgcttctccgacacggtcgaggagacgagcgccggcccgtctggcctcggctttggctacacgctcgacgagcgcgacgacgagtggctccgcgacaacaaccggatggcccgcggcgagggcacgtcggcgagcgcggctgggacaccgaacggcgcccgcgcaaagggcaaggagaaggaggagattgtcgtcccggctatgaccgaggacgagtttgagctcgtcatgggcttgatggagcgctggacggacgagaagtatccgacgctgcatacggtgcgcctgcccccccttctcgcggacaccttaagattcgaggctgacccttcgcttgccccccctcaggatatctcgcgcatcccagccctctctgacatggagtccttcttttcacatccgctgccgatgactttctttccatcctactctgtcccgccggcggtcccaccaccagggatcctctgtcgcatggcgaagaccgtctacccacattggcgcgagcgccggatcgccgcaggcggcaagaacatcattccgcagctcaacgtgcgcttccactcaatgctcgccttcgctccctccttatcatgatcacctctaacctttgttttgtgcgccgctctcctcagtacgacgagtcgaacgacggcgacccctacgtctgttttcggcgacgcgaggccaagcctgtccgcaagacgcgccggaccgactcgcagtcggtcgaccggctcgcgctcctccaggccgagctcatcaaagctcagcagctcgcggccgacacgctcgcgcgcgagcggcgcaagctcgacctcgtcctcgtcgagcgcgaggcgtgggaggccaagcttcggctgatcgacgccaagcgcaagtacccggccttcccgctcaagcccgatgaggaggagctccttttccggaccggcatcggctcgaccaagaagcagcggatggccgacccggtccaggcgcgcgaggagaaagtgtcgaagacggcgcgcaagcgcgagagcctcgccggccgcgacagcgcctcggcgactggcagtccggcgccgggcgagccaaaggagaagcgcgaggaccggccgccaccgatggaggccctcaaagagcgcatggccaacatccaaatgcagatcgagcgcgacgttgcccggaagcgcgagggcgactaccagtgggaggaccagaccgacgtcgcctaccagccgctgccgatcccggcacaggcgcgcatgttccggcctcttcaacccgaaccgaccgcatccggctcgctcgccggcccgtcctcgccaccgccgtctacgtcatcgcgatcctcgacgaccttccgcctccggcgcggccgtggcggcatccttcgcgtcgaccggcacatcgagcaccggccacgaccctcacatcgtggctaccggccgtcaagccggtccgacggcggaacgacagaagcgcttgtcaacgaccttttccccaattcgtactttggccacgcctcggagcacccgctccggccggtcgaggacgacgaagatgaggcagacacgatggacggcgtcatcgagagctcgacggcgcactcgcacccgtccctctacgcccatcgacctcggcatacgccagaggagatcgattatggccggcgtatatcggagcgctggcgctacgatgctgagtttggcgtcgtcggggcggggatgggcatgcgcgggctcgaggaggaggagcgcgttgtcgtcgacgagtacgaggaacggtcagtctccagggcctgctttcgtccctcttgcgcagaactcgtcgctgaccgtgcatcctctctcgcaccagtcacctccgcgtccgcctcggtctctaccaggaaggcgacctccagatcctctcgacggatccaacgcacttgcttgccgcccagaaggccgctctcgagccgccggaacggccgccgcccgtcatcctcgtccgaccggcgcctccgccaccggcacccgtctcgcagatgcccaacatgcgacgcgtgccctctaacgggcccggccttccgcgggcgaacggcatcaacggcagtcccaacctcgggcccgctcaaatcccggcgatgatggcggcctcgagcccgctcgcgaacggcatcgaacgctccgcctcggtcgagggcggcatggccaaaccgatcgtcggctcgcacctcaacggccagcagaagcggccgcctggccctcccggccccggtggcaactatcctggcctcccgtcgggtgccaacgccaacttcatggcgtggcagaacaaggtgcctggcgccaacctcggtttccgagcgccgacgccgaacggcgttccgctcggcatgggctcgcctcaggtccggtcggcctctatcccgtcgccgattccggcccacaactcgcccattcccgctcacatgagcccgcaccagcagattcagcagatccagcacgtcggcggctcgggctgagggcgacactcgtccttctaccccgtcgctcgccctccacttttgcgcccttttaaaaaccgatgtccggcctcctctcgtccttccgagcgctgccccctcgctcctcccctccctttaacgacatctcgacgcccccctcgcctgcccttttgcaaacaccactacccaatcgcctcaatcactgtattccaacttgcactgcaccccccctcggaccgccctgctctcttccaggtcagcctttgaagacgttcatccggccaagtgcaggcagagtcaacgcacgatgcccttgttctcctcgccgagcgtgttctcgaccgggacgcgcacattgtcaaacgtgacataggcggtgccggccgtcttcgagtagcgcgtcgtcatctgcttggtctcgactccctcctgccgcggtacgaggatgacggtgagacccttgtccgtcttacagccgacctgcaaggtgattgattgcggcggtcagtggggtgcgctcgggctgtcgttcccatcgagaagggggcggacggtaaagtagctggcaaagcagccgccagtgatccacctggccgagcgagagggcagcgtcagtcaaagatgacaagcacagcacttcaacggggccgcactttttgtggccgttgatgatccactccttgccatcggcgctcttctttgcctcgcaccggaggttgctgacgtccgagccggcgaacgcctcgctgatagcgaggctcatcgactttttgccggaaaacatctcgccgacgatcttctccttgagcgccggcgagccaaagttcaggaccggcgggaggccaatgacggtccctgcgccgaggccatcgttgtagccccgggcgccggcgagcgcaatctcctggatgacgaccatctcggaaaagtctgcgtcgcgacgagatgtcagccggtgggatcgacagcctacgatggagagcaggacgcacaatcaaactcctcgggcctgacgatgccgtccatcagggtcaggcccttgaggtgcgggccgggctgcagcagcagaggcagtcaaggtcagccgacgcgccggccgagacgctctgcaagatcggcacgcaccccgagccgcatcgcgtggacattgagctcggccatgcggtcattgacgtgctggctcggatacctgcagcgagcccggctcggccagtcagcgagaggacgagtcaaggagagacggaggggaccgacttgtcgttatcctcgcatgcctgggcatcgggctggatcgtctcgtcgacgagcttgcgcatcgctacctggagcttgcggtgcgagtcggagaagtagggcgagtggtaggccttggtgagccaggtctgcgggcgggcggcgggtcggcacggaaaaggtcagcctcagagcaggtcaagaagcagggaacgacagggcaccaaccggctcggcgtagggcacctccctgagcgcgcccttctcgcgcgggaagatcgaccggctctggcccttgatggtgccgattcggagcctcgcgtaagccggcttctcgagcacctcggcccgatggaggccgtagaagacgtccgtcgcgtcctggccagcgaccgtgtcgtcgatcagggcggcgaggccgcccgggtggaacttggcaaacttggagaggtcgtagacgaccgagtcgataatgacccagatgtcgccctccttgttgtgctacgggcgacaagcgacggcagagcagccagcaagatcggcagcatagcaaggcgaccggttcagagggacgggagagacgggaggtcgggtggtcagcgcgtgatggcccggcagggtgggtaggctgagaccgtcgggctgttgcctgccgcacttttgcgacctcttcggtcgtgaactccttggcaggtgcagcgtcgaccatcttgctttggcgtgtagggtcttgtcgatggcaggctgtggtcgtggtggccaagagcgaatcgtcgtgcggccatgccctgcaacccaggccgggccggagcttagccgagacgttctcgatcgccttccaacccggccatgcccgtcaactgccagagaagcgcagccgcccgaacgatgcagatgggtcatgagaagcgaaaccaaaaagaagaggtggtatgggaagcggcagagagaaagaaagagagaggcccggctgcgagaggcggggtcaaaggcatttgccttggtcgttggcagggacgcgccggcccgcgtcgaccagagcgcgaacatcactgggggacgatggcgagaggcgaagggcccatagacaacggagaccgagttgagctgtggacaggagacacaggacggacgaatcggtggccgagagggcggccggctagcggaagcgagcgagcggcgcgacgacacacgctgtcgctcaggcgacgcgctgctcgtgctcgtcctcgccgacgcgctcgtggtcgccgacgacgtactcctcggtcgggtcgatcgccgggtcgacgacgaggtcctcgaccatgtcgaccctcgacccgcggtgaccgtggccatggtcgaggtggccgaggtcgtgatgcgttggtccagggccgagcgaggcagggccgtagagcgcggcctcgtcaatcgccgggctgccatgcgcatggtgggaatggtggtggtggccggcatggaggagatggccgccgacatcgacgccaaggttgtcgtcgtcgtcatcgacgtcgtctgcgaggtagtctgccgtcgcatcgcgctcgaccgccgaccggtcggcctcgtcgacgacgccgtccatcgggtcatccatgtcgtcgttgccggcgctgcggtggatgtgatggtgaccgaggccgacctcatggccctgcgtgcccggcccggtcgacgacgacggcaagtcgtcgccctcgccgccgtgtccgccctcgggcgagctctcggcggcgtcgtcctctgcgccgctgtggctcgccgagccgccgttcttgtcgcccctccgattgctgctgccgacgggcctgctcttgaggtgccggccgtacaagccggcggcgtcctcggccgcgtcatagtttttgcagcgcttgcggtcgccccggccagcacacttccggccgtcgtggccgttgaacttgcagaccttgcagtgccgggccttgcgggcctctccgttcttcggcgggaggacaaagagcgtgttgggcacggtcggcagaccgccgtcaccgagcgtcgggtcggtgagggagttgtggtcgacgccgccggccgcttcgctgagctctggaggcggcgacgggagcgagaccgagcggtgtgacatgggagacgtcggctcggcgacgtacgagcctgaggccgagacggcgtcccacgggttgggcgcaccgggcccagcagccgacggcggctgactgaccttgccctgggccatgcgtgcgttgagattgcagttggcgcggacgtgccggccagggcaagcggccgcgccctctggatcaaacgtcgtgcagcgcttgcacttacgcgcgcccctcggcgtctcgcggccggtcgcgctcccactcgcgcccgagccagacgacccgggccggtcgtaaggcttcttgcggccagacgttgacggcccaacggggatcgagaggctcggcgcacgttccgactggccgagcgcctcgccgccgtcgttctcgccgccgttcaggtcggccggaggcgcgacctctggcagctggtgcgggtcctcgtgccctccgagctcgtcttccgtcggtcccgcctgatccattggccgcgtttgctcggcaaaggccgccataccgctcgggccggcgagcgacgactcggcgagcgtcgggtcaatcgcagggtcgatcacactgctgtcgacgtattccatcccggcgtcggcggcggcaaagaggtggtggtcgttgctggcggagccgcccgcgtcgacgccgccgccgctgctcccccgccggatcatcgagaggattccagcgttgatgccggcaccgagcgaggcatcgaccgggaggccggcagacggcagaggccgcggccggccgttggcctgggcctcgagctcggcctcgcgcgtcgcgttgtacgacgccatgacctgggcgatgatgctgccgtcgaggtcggacgcactatggccgccgtgatggaggtgctgctgaaggtcgtgctggaagtcggacaggtcatgcgtgtggtggtggaggtggctgccgtcgtcaacatcgacgtcgtccgggccgccggctgagggcgcgctgcccgagggcccggcgacggccgcatggacaaactcgtcgtgtgcgaggtcgtcgtcgtggccgtgcgtgtaggcactctcggcgatgaactggtggtcgtcgccctcggtcggctgcgtaaactcgtgctcgtcggccggaccctgctgcgggagttgtggctgagcttgctcgtcctgctcgtcgtcttgctcttgagactccatcggctgctcctgctgcgagacgtcgagaccgagactggcattggctgcggccgaagccgacgagcgcgatttcttggccgccttgcgggccgcgacgttggtcggatggaggtggtcctcgagcgtgagcggctggccgtcgaccgagctcttgaagacggtcgggtcaaagcccgaggcggtgaggagcgtctcgacaatgaggttgagcaggctctcgatcgagccagtgtgcgtcgtcaggatgtggttccggtactcgaggcccttgggctggaagcgctagaaggcagcagggtggcaagaggacagagcgccagagctcggtcagcgagagctcgctcaccagagctggacaagcactcagcacgatcctacctttgtgcagtgcgcccaggcacagtcgactgtcaaatgggggcgggaggatgtgagtctccggtgtcagcaaccgagccgggcagcgcgcatccaccacgcgagctcgctcgctcgagagacgcactcttgccatcgtcgatgttgcccttacgccggcctgcgttggcgcgcttgccgccggcgtggtggccgggtctagcaggtggatggacaacagggcgagcgcgaaccgaggtcagctccctgccccgtcacggtcgaagcgagcagctcgccccggcagcgaaccgagagggccgggcacgcacttgttcttggatcctggagagcgatagggtgtcagcgagaccagctccagagcgacatctgctcagctcagcgaacggaccttttgtgcggcccattggtgggacgagccccgcgtgaggtcgggcggcccaggaggaaggtcagcgggttcacctgcttgcttgctgcccttcgagccgacgaggcggtccgcgaaagcgtgttagttgggaggatgctgaagttgcgatcttgccgacatgagagcgcacctgccggaagacgcgaaccgagatggtaggctcgctcctcaacgaactgggtggcttgctttgggggtgacgggcgacggtcgaaaggggcggcggcggggcggtgtggacgaaggcccggttgcagcgcgcgcagaaggcctttcttttccgctcggagaacagctgtcgtccacacacgtcgagaacatgacgaggctggcaggtcattagcaagggagagcgctgctttcgctgacggactggcagtgcgcacggcgagtctgacttcgatgccttcagctagggcccgtgtcgcgccgcaacagttaaccgaccggaccacccacgaccataggccaggtcgtccattgaatgagcgtagaatcggtgcgattggcatagtcgatacagagagcgccgtgctttgttcagaagccaaagacgagctcgccgagcttgccgaggtagcctccgctgcccctggcctgaccgctcacaggcgcgccgccgcccttggccgcttcagcgagcgcacggtcccgtcctccgctcgacgaggtagccacggccgcctgcgagggtacgagacgcttgaaggccgacgaggctggtgcgagctggatgggcgtcccaatctgcttggcggcggcgttccgaggcgtcgaaggctgctgctgttgctgtgcgatggccgtcgtcgtcttttgctgcggcgaggtcgagagtgcggcggccgcaccaggcgtcggcgaggccctgttgagcgcaggatggaacgggtcggcccacttgacgccgatcatccacgccccgccaaggacctcgccgttccggccgatggcgcgccgcgcgtcgagctcagagtggaacgtaacggtcagccagttgccgccggatgggtccgagaaggacgaggcaatcgggccgagggcggaaaagtgcgagacgacggccgggtggagggtggccggcgggccaaagatgatcacctgcgtgttggccgaaggaggactgagcgacgacgcactcgaggtcgggtacgtctggtgcaaagtggagcaattgagtcagcgccagcagagagtgagctgagggcctcgacgacgtacctctgccagctcgggcgctccgccgccgccgcttgcggccgcatcccagcccaggccggtgctctcggcttggttgtcctcaatcgacatgacgggcggtccccattcatcatcgtcgtccgcgtccaggtcctgggcgcgctgagagctgccgccgctgggtccaaggccgaggtgctggcgacgcgaggacgagccctggcgctgctggtcgagctgtgagacggtcagagccgtcgacatggtcggactcctgaaatgcgcaaccgacattcgtcagcacaaggtcagggctcccgagcagcgaagggaggaagctcgacagaccggtcaaagaggcctcccgtaccgaagcggctcgacccgccaggcgagggcaggccaccgccgagcgaggacgacccaccgccgctgtaaccccgcgagggcgtcccaaagacccctccgccgcccgagccggcgagccacgggtcgccattgcggtcggcggcactgcgcgagccgtagcctggctgttggtgggccggctctggcgaggcgtggacgcccttgggcgactgttgagcgagcgagcagcgcgaagacggacggcgggtttgctcggcaaggaccgtcagcttcctacaatgaccactctcttcagagagccgcaggcagggcgaaaggacgcacaccacgaagcgaggccgtcaggtagcccggcaggtggttgggcgccgtcccgggctcgtccatcgtgtcgtccatcagcgccggatgctgcgagaaggccggcccgggcgacgacgtcgaggccgcctggaaggacgagccgccggcaggaggaggaggcgtccaccacgacatggctagagatagaagaatacgggagagaagggtcgagtggctgttgacggttcgagagcaaaggagcacaggcttaacgacctccgtccacccgctgtcgcccgcgcactgcacccggcgagcaactactcccgcaccgagagggcccgactcgaggtagcgacgacgaccatcttcaagcagcaccctcaatgtcgtgctagagacccggactccttcccgcccgtccccttatgccccttgctgccgccctgcccgtcgctagcccctctgcgctcgagccgctcaagccgctcgccgtcgtcgacttcgccggccagcgccacacggccttcaagcagtgggccgccgccgcaaagacgctcgacgaccaggcaagccaggccgagcacgaccgcgattgggagcacgcctgggtctggagcaggaaggccgccgcgtgagtgcttcacatccttctggagggtgagatgtgggaggcaggaggaggggcgctgcggccggcgacgcctcttctcccatctcgcttcctacgtactctctcgagagactccggcaaccaatggcaaggcgctgaccgcctgctcgtgaacacagaattacccaccacctcgccaacgagcacgccgaccggtccaagattgagaacaaggagctcctcaagccgctcctccggctcgtcgtgcgtcacccctctctcgctcgcttgcctccatcgcgatgggcggccgagctggaccatcatatcctgctgctgacgccaacgcccctatcggactctggacagacgtctgaatcattcaaagcccgcatcaagacgtccgagtcactcctctgctcgcgctcctcctttacagcctccgctcccaacccgccgccgccgacaaacggccgcagaaccgcagcagcgatgccgccgccgtctgcctcgcccgagccgccagctcccgcgcccatgtcaatcaaggagcgtatggccgctctccgaggggctgggctcaacacgggcggcgatgagccagtgatgcctggcagcccggccaaccgtcggggcagcgtccagctaagcgggccgccgaagcagccggctgccaactcgacggcaggtccagcgcaaacgacatcagcagcagcagcagcgccgccagtagtgaatggcgcctcctcacgggagactagcgggagcctgagcaggccgtcgtccggccgtgggaggaagcgcgacgaggtcgtcgagcgtcttgagcggctggcgatggattcgtcaccgtctgcgccggccggcagcacgacttctgttcctttgtcgccagctaaggttgcctcgccgacgccggccgccttcccatcctctgtccctctccagccgactcaggcgtcgtcacagcctcctcctgccgcgacgcaagctacgccgctacctccacccgacgtcgagatctcctcgccctcgcccgtccctcctcctcctcgtccttcagctccagaagcgccggcagcctcaattgcagagccagcagcggccgctccgcaatcggccgtcccgtcgcgcatctcgcacggctactctgcttcggttccctctgcacgctcctcttcgccctcgcgtgcgtcgccgacgaagccgccaaagccgccggcactgtcgatccagccagcgacgacaaatccagccgcgctcgacacgtcgccggcatcagcggcatccgagcagctcggtctgggtctcaacagcggcggcaacgccagcatgaacggcagcagcagcccggcagcgcagacgcccaaacgccggtcgaccctgaacgacgatgacgacttctcgccctcgagattcggccacttcccgagcatcacggagttcgagtcgtcgacgacgacgtttgacgagcccaaggtctcgacgcctgccggggagaatgcgccctcgctgtcgtttccgagcctgccatcggtcccgctgtcgctccctgggtcggcgccctcgacgacaaggccgctgccaagcccgcctcttccgcaagccggcgggttccagaccaagccgcagacgacgggctcttctgtcgcctccttccagtcggcgctctcggcgccaccgctcgcctctccgacgctccaatcggcgcccaatggcatctcgcacggctcggttgctggtgctgtcgccaaaccgtcatctcagccgtctcccgcttccgatcggccggtcgacttccctctcgctaacacaatcttcccgagcctcctccgccagtacctgacgctccctgtcgaacttcttctgctcgatgtccggccgcccgaggcctggtcgtcacgcatcactccgacctcgaccggcggcggccaggccgactgcgtgtgcatccctgcacgactgctctcgtcgacgctctcgtcccagcagctcgccgacggcctgccgcggacgagcccattccataatcggcacctgtacgacctcgtcgtcatttacgacggcgcgagcaccggctggaccgcacccggggccgagggcgcgcaggctgtcaatcgggcggtctacgagcgcgaatttgggggtaagatgctcaaacgggcgcctgtcctgctcgtcggcggctgggaggcctggagcgcctccaatggcggtaggcaggcgatgacgagcccaggactcggtcgcacggccgaggtaaatggctttggcggctcgcgcgacacctcgccggcctccaagccgtcctacttcccgctggtccgtgtatcttgaccgttgcgggctgcgagtcccaaatgctgaccggcacttctcgcactacagatcccgccgatagcgccgacgcaggcagctcgtccggtctcctcgtcaccgaatgccagtatcgggccggctttcccttcgccgtcggacctgcctgctcgaccctcgtcgacagccgcccctgcttcgtcgtcggcgtacaaccattcggcgccaatgacggcccctccggccccggcgtcgctcgcttatccgagctcgcgccgacggtcagagtacgtcgaccagacgagcgcatacacaggctatccaggaagctatggctcgccgacgagcgtccagtcgagcagcggtatcggtggactcgcgccgcagcgcggccagtcgatcgactatccgacactgtcgccctcgtcgtcgtcgtcgctcgaacgaccgccgccgccggtcgcgccgcaccgcaagtcgagcatgtcgatttcgcatccgccgtcttccgtcacgtcgtctctgccgcaaccgccgccggtcgccgcaaccccgccgctcgaacgcaacgcctcgcgcggcgcgctcgtccgaagcggaagcttgaccttcccgacgctgagtgaggacggaaagctcgtccagagcagcggcaacgaggtgacttactggggggacgagatggtcggcttgagcgggctgaagaaccttggcaagtgagtattgacgtttcatcggacgcccgacgccaagatcagcgctgatcgctcgactttctcttacccacagcacctgctaccagaactcgacgctccagtgcctgagcgcgaccgagccattctcgaccttctttcgcgacggccgctggaagcgatccgtcaacttcaacaataatctcggcacgaagggcaaccttgcgagcgcctacagctcgctcatctcggcgctctggcaacaggagtatcactttattcagccgttgtcgttccgggtgagtcttagcttcgcctcggcgcgcctcgtgctcgccgctgagccttgttcgcctcttgacagaaatccatcgtcaagtttgcgccaacttttgacggcgtcgatcagcacgactcgcaagagttcctcgccttcctcctcgacggcctgcacgaggacctcaaccgggtcttgatcaggcccgagccgatcccgatgacgcccgctcgcgaggccgagcttaacacgctgccgacgcagattgcaggcgaaaaggagtggcagatttacaagaagcgcaacgactcactcgtcgtcgacctcttccagggccagtacaagagccgaatggagtgcctgacgtgccatcaggtacgactcggcgcgacgctgtcggatcggtacttgacccgactgaccgctttgccgcctgccgctcctagacctcgacgacgttcgacgccttcatgtacctttcgctgcctgttcccaccagccggctcaagcaaaaggtctcgctcgagcactgcctcgactcgtttgtcagggaagaggtgatggagaagggcaacgcctggtgcgtccgctcgctcctattggtgggcgacgatgtctgacgctttgcccgctccggtcccaggaactgtcctaagtgtaagaaggcgcggaccgcgagcaagagcttgacgctctcgcgcctgccgccggtcctcctgatccacttgaaacgcttctcgacaaagaatggcgtcttctgggacaaggccgagacgcttgtcggtcagtctgccgcgcgctgatctttccgcctagatcatcttctgatggccctgggcgcgtttgacctcccacagagttcccgatcaagtacctcgacctcacgcggtacatgccgccgccgctctcagcgaccaaggacccggttgccgaagctcgctaccgcgaggacccgcgcacacagacgccgccttacgtttacgagctctgttagttccgccccttgcgagtctttcgacctgccgagactcgtcactgaccccgcaccatcttcttccacgcgccgtgcagacgccgtctcgaatcacgccggcagcttgacgaccgggcattgtgcgtcgcctcccctctgaccgtcgtctgggagcttgagctgaagtctcgccgcccctctcctcagacaccgcatttgtcaagtcgtcccagcggcactggaagtactgcgacgaccgtaccatttccgaggccgacgagaaggacgtcatggtgcgtgcagccgaccctgatgcaaataaaaagcctcgcgggctgacatccgagcctccgccgttcttgcagtccaagcacgcctatatcctcttctaccgtagagtgcccgctaagcgcagcctgtgatctttctctcgcatggaacaagtctcatgctatcggcggcggcggtggcgtctcgaccgcagcgggtggggctgcgactgcgacagctggcggcgctggcggcggcggtagcggcgacgccgggggaagcgtcgcctgaaggtggcaccgatggcaagtcttggcctcgctgccgtcgccggcgggatgccacatgggcgagtagccgacctggcaagaagcgcatgatggcagcggcactttgctctttgccttgccggcggtcgctggaggtgcgggggaggccttgacgaccggaagcagccgctcgagcgcctcggcccggcggaggagcggaaaggcggcgagtccgactggcggttgcttgtacgtctcgacaaacgtctcgagcgccgtctggccgctcgtcgcatcgcgctcgtggagcgggtagatgaggcggtcggcgacgtcgtgctttttgcagacgatccgcgggtgcatgctgtgtgccggagggaggttagctagggtgccggccgtccgagtgggaagtccacttacacgccacgctcctcctgaaacttgacgaccgagacgtccttgcgcgacgacttgacctgatagacaaacagacaggcagggtcagcacctccctacccccttctgcgtcgacgagatgcagtgggcgcacgagcgagatctccataccgagcgtgtagcccgtcttgtgggcgcaggcgacgtgaaagacgtcgtggcagtcagagcacgagacgacggcgccttgctgggcgcggtggcagatagtgcacggctaccgacgtggagagcgcaagctcgggtcagccgtcccatcatcatgcgcgagcgtcaaagcccgctggcaacgcaccgtcgtccaggcagatggctcggcgaggtggacgccctcggtcagcttcatctcagccggatctgaaaagtaggtcgccggctggaagatggagcagtagaggtgcgccctgcaggtagagagaaaggagcgtcagcgctcgccctctcgtgctgagcatccggcgcccgccgacgcaccagttgccatcgagagtcggcttgagcgcatgtaagtgactcggctgcgggacggtcggcggcgggcccttgagcttccacgtccccgggcagaggacacagagcgggacgcgacggaattgctccgtctcggcgttcgagcagagctcgcagagccagtcgggcccgacggtcgatcggtccgggatgccgtagcatgccggatggacagagaaggcgcaggttgagcaacggacgacggggttcttggccggctcgtggacccggcagagggcgcacgggagcggcttaggtggagggcgggcgggcggtggggctggcatcggcgacgctttggacgacgtctttggcgagctggcgcggccgagctggaacgggagggatggcagtcagatcgagcccggtaaccaaaacgagtcgttcggcggctcgcaccttctgcttcttgagcggtggcccgctcgcgctctcctggtcctccatcttgagcttggccgacacttttggcagctcgaccggcaaccgtttcggaatctggccgtagcgctcgaagaggtcgtggcaggggtcacagtagacgccgtcatagtcctcttggatcatcgaccaccaccggccggagcggacggcggcgcaggccgagcaggcggtcgtccccttgtcggccggcgtgaagatcaggtccttctcggtcaggaggctctccggcgggaagaggaccggctcggccgccgccgccgcgggggtgcgctcgaacgcggcgaaaaaggcccggagccgctcggccttccactcgcggtacttccggacgcacgctccggccggccggcccgtcgcgagcgcggcgtcgtgcgcgtcgagcccgtggtggtcattgagcgacttgacgagccgggccatctcggcatccgagaactgcggcggaacggggcaacttaaagtcggtcagcagagctccctcgcgcgaccggcagatcgacagacgcacagtgacatagtcaaagaacgccggcggctgcgtcttgagccccatcagcgccttccgcttcgcctcctttgagtccgacccttcgggcgccgtgtcaaacgcgagcgtcgcgcgcagcacctgctcaatgacgccgatgttgaatgccttgcagggcgcgggcggcttgaagcctccgagccagtcgaccgattcgactgcaagagcgaacaaaggagcgacgtcagctcgccggccaagctcctcgactggaggagggagggaaggacggaccagcagcagaaggctgcgagcccagctcggccgtcccctcgccgcctcggtcgtagatcccattgggccggtcaagctcgccgacgtccggcagccaagtcgcctggaacttggacccgacgcgcgaagccgagcgcgggaaaatgccgtcgtcggcgtctgagcgcgcacgaggagcccgtcagcttgcaactcgtcggcgccagatgacgagagcccactcaccgaccgcgtcctccgcgcgggtatactgcccgagatagcgcattggccagcctcgaaacgtccttagcaccttgtccgcgctcgggaccttggcgagctgctctgccgccttgagcgcgcgctcgagcttcggcttggctggctgccggtggttgtcgacgtcctgctcgtgctggaggtagcagggcgcgcaggtccagctgcagcgcgtgcgtgcgtgcaggcaggcaagaacgaaggtcagaggatgtccggcgaggaggcaggagaaggccggggacggacctgtagcctcgtatcggcttgctctggacgcgcggcatgcagcacgccatgtggtagctctctgcgcagatactgtccacccccagcccctcagtcagcctctgacacctcgtcaagccggcccatcagctcgaaggcgaggtacgcacctgcaccggaccgagtcgggtgggcttgcccaggccgcgcagaccttgcacgcctggcgctcgaccgagtattccgcaaaggcctccttctcgcagacgagaaacgagtagcgggcggcgagaatgtcgcggatctcggcgggcactggtccccaggagcgcggacggtcagtcagcctggaggggaacggaagcagcgagggggggggaggacagacggtttcgatacgccttgatcgccacaacctcgtactcgcgcttcagatactcgtcgtacagcctctcaaagtaaaagtgatttggttccttccgccaagcggccaggtcgtcaatgtgcgatttgtgtttgactgccggtgcgcgcacgcgggagagggtcgtcaactccgtttcttctgctggcagaggtcgagggagagggagaggggagggacggaccgtagcacttcccgcggagatttgagagcgggtggatgaatgatttgaaagcggtgtagaggagccggtcgtccttccctcgccggccggtgacctatgacggacggagacgaggcaagggcggtcagctgcggcgacggtgcgtcgcattgcagaggcgagctgctggacggcgggcggacactcggtcaagcagaaggacgggcggaagggcgacactgacctcgctggaaaggggcgcgcgcgaatgggaggagagcgacgacagaaggggatcagcgctcggctcttagctggctcgcgcggaaggcggtcgtctcaggaagacaagagagctcactcgggtctgaaacacaccgtcagcaccatagcagtgtcagcctttctttcttcgacccggcacccctccgctcgccttggacgcaccgcaagtaaacggcgagcttgacccgcatctcgccctccttcgaccccgccgccgggccctgcgcttgaggcgccggcccaagaagctccatgacgcgccctacggcccatgcgtgtcctataaacggcgttgcgcagaaaacatggtctgccaggaggggagcggcgacggcggcggtggtggtcagcgcgagctcctcggtcggcgtgagaaggagggagggggcgacggaccgttgacacggattgtaccgcccaaagggagctcaagcgtaagcggtatcggccggctgccgttcgtcggcggcttggagggcggcataaagacgagacggcggacgctctgtaggcaaggcgagaggaggagcgagagggcggagacgcgcggcgcgcgcgcgagaagacgcgacgacggccgggagagagtcgagctcgaccggtgctgatgctcggagtgtgcggcctacgaggaaagagagagggcgtccggggttcctagcaggtctgtcgtgtcgaggctggcagtcttggcaatggtaagcctgccgttgctgctgctggtcgtcgggcggtggtcgtcgtcgtcgtcgtcgtcgtcgccgaggccaagtcgcgtctcccgcgcgccggccgacagggcatgagtcgtcgactctacacatgaaagggccaccaattctatcgacagttgtttcctgtttgcagacggtcatggatcgttgaggagcttgcgctgaaggcagcagcagtgagcgacgtcaaggtcaggagcgttgctcctcgtcgcatgctgacccctcctatttacacgtcgtcgacagttaacttccagcctcgacgagcctcgacgagcgatcaaagcgggtcgagctctgcttgttcctgagggaaaaagcatcagcctgctgcgagctggtcgtttggcgcagaagaacggcacggtccaactctgaccgcggccagacccaccctgtcgcttgcctcccgcgccgcttgccatcctcatctcgccagcgatcgaaaagagaagggaatatatcagagagagaaggggcgagtcgtctccggccgcctaccagaccatctcggcctcgtgcgtcatgacgccgacctctttgcgctgcttgaacaggttcgggtagacgaactgccgtgcgcaaaagccgcaagcaggggagtcagccaacggcgcgcgagagcgagcgcgcaaggaggtatggggaaagagagggaccgcaccctctgatcatactctctcaggacctccccgcccagcacaggacgtctcgttcgcctcgtacgagtcgcgccggacgccggggctcgtcgagatcgccaagctcaaggcggccaaccggaccttaatcgacgagtatgacgacgagtggcgggacgagtggtttgccgagtttgcctgaccgggattggcgatctatgcctcttttttcgccaggctcctcgtcagccgctgagctagcctcagcctcgtagtgtcatctcaaagagggccgagtaagccgcgtgttaacttgttcgcccgacgcctctagttggatgcgatcccccgccgagctttgcgagcgaatgtcgagacccatctatctctgcagacccgttttcttttgctgccgaccagggctcaaaggtccttggtctcgcgccagtctcgaatcatctcgacgctgatgcactcgagcttgtgctccttggcaaacgcaaggcagtcggcgagctgcgccatgcggcctgtcgggttgggctcgggcgcgacgagctcgcagagcagaccagcctcgggcaacgacgtcagtcggcagaggtctgtaagtggtaggacgtgcagaggcggtgagtggtatcagaggttgctatctcgaggactgagtatctgggcggcgacgagacgtaccgagcgacgcctcggtgtgacccatgcgggtcagcgtgccgccctcgacggcccgaagcgggaccatgtgccctggccggttaaagtcctttgccgtcgatgccgggtcggccagcttgcgcgctgtcagtgcgcggtcgtgtgctgagatgcctgtcgtcgtgcctgggaccggagccgtcggttgaggttgcagggaagacacagtcagcacgtgagccgcggtctccatgtcgccagcctccgcatcgatcgcgctgggtacctgactccagtcttcagcttgaccagccaagacgcgagtctagtagcccttccctgtcggatccttccaatctcggctcctccttccgcggacgaggtcgagacgcaccatgccggtagtcgaccgtgaccgtgtaagccgtctggttggtctcctcgtttcgctcgaccatcatcgggatctcgagcttggcaagcatctctccaggaagggcgatgcagatatagccgctgcggcgacgagtcaggcaagggtccggccagtcagcccagagtagctcgggcggcgacctccgtccggtccgaccgggagacgtacgacgtgtgcttgatgaaccaggccatcttctcggtcgtgcactcgctcgcggcaatcagcagatcaccctcgttctcacggccctcgtcgtccatgacgacgacaaactcgccccgggcaaaggcggcgagcgcgcggtccatcggcgagaagggcgagctcggggcggcggcggcggccatgtcggaagtagttttgttggcgagcaggcgagacgtaggccgtgaaggtggagagcttcaggagagagacgagcaaaggaggacgtggtcgagggttgcgctgatcggtgtcggagagagggagagcgcggggaagcacgagctgacggcgtcgtcgagagagttagcgtcagcgggtcccagcaggccctccgaccgaccgggtctgctgagcgacccgtccccaaggcaggcttcccgtgcaaaagacgccggctattgtccagctgctttgtccagattgcctgtgacttggcaggagttgggaggcaaatgcagccagtacagccgaacaccctgctgtcggctcggctgactcgtccctgcttacttgctgctgcgggcagggcgaccggcagcgagggtcgagccgctggctggcacgcccttgcttggcagactctggccttcatatctgcacgccagtgatcaggcttgagtgcgaccctcgacagactagctgtaccgcgagacgtgcagggctggccagcttgagccggttgacaaggctgcctggccgtctcgatcgccttacgcctccgctgtcgtcgcgtcgcgctcgagctggcgcgtcgagctccttgcttcccttgcttgccgaccgtctcctacctctccgacccctctccactcctgcagtagactacgcagcttgcacctgttggctctacaagcgcgagcagcttgccctccgagactcgtcgcggactttctcgccggccgcaatctcctcgacgccgcttctgcagccctagcttttcccgactatgccgcgcgagatcatcacgcttcaggtaagtccccgcagtgagcttcttaagcgtgtttctttctgctggctgatgctcggcttggatgctgctcttcttaggccggccagtgcggtaaccagagtgcgtcgccttaagagctggtcgatcaagggctagctcaatgctgaccctgctccggcaacctgttcctcgctcgccttgctcactgcagtcggtaccgaggtgcgtcctcgccatcgctttggcatctgggagctgtgctcagcctgaagggcgcagccggatgggatgcgccgcatgggtcaggacgcatgctgaccttgccttctgcacgaacgcgttcgtctgtcgcccggctgctctttagttctggcagcgcctctgtgctgaggtacgtgtttacagctacctgacgtcgcagcagcagtctctcagttccatcatctcctgctctgaggcgttgagcaggttggagtcgagccggacaggaccggacaggaggcggctgggagctcactcgcacggccggctcgccggagcgcccgttgacagctggtgtcgatcatatgctgaccttcgcgtcccgcgcgctctccacctgcagcatggcatctcgccagacggcatgattgaggactttgccgccgccaacgagggcggcgaccggaaggacgtgtttttctaccaggccgacgacgaccattacattccgcgagcgatcctcgtcgactcggagccgagggtgcgtccgatcaatacgagggctggcatcactgcccagcggctgccaccctctgaccgagggtattcggatcggccccgacccgccctgacaacgaaggctaacccggcctctcttgccgtcgtcgcttcaggtactcaacaacatcaagcagtcggcctttgccaacctctacaacccggagaacatgtggacggcggaaggcggcggcggcgccggcaacaactgggcgatgggccactcgatcggcgagaagaattacgaggagatctttgacatgattgaccgcgaggcggacggcagtgactcgctcgaggtgcggcgctgcctgcgctcattttcaccgatgtgacgagaaacgctcgctaatgagccctgcgcctctccccagggcttcatgatgatgcactcgacggccggcggcaccggctcgggcctcggctcattcctgctcgagcggctcaacgaccgcttccccaagaagctgatccagacgtactcggtcttcccgaacgccgagtcgggcgacgtcgtcgtcgcgccgtacaactcgctcctctcgctcaagcggctcgcgaatcacgccgactcggtcgtcgtcctcgacaatgcggccctcgctcggatcgcggccgaccggctcaactttgacaacccgagctttgcgcagacaaaccagctggtgcgtcgggccgtaccctgccgactctgctgttagccatgtgctgactgcctgtgcgtgacccctgggccaacaggtctcgaccgtcatggctgcctcgacgcagacgctgcgatatcctggctacatgaacaacgacctcgtcggcatgatcgctagcctcgtgccgacaccaaggtgccacttcctgatgacgagctatacgcccttcacaaacgactcgattgccaaggtcggttcgcgcaaccccttgcagagggtgcctaggcgctgacgtcgacttgcgtccgctcgcccccctctttctcaggccaagccgataaggaagacgaccgtgctcgacgtcatgctccggttgctgcagccgaagaaccggatggtcacgacgacgccaaccaagtcgagctgctacgtttcgagcctggccatcatccagggcgaggtcgacccgacagacgtgcgctctagcctgacctcgtgcgatcttccggcgccacgatgctgatccctcccgccccctcttcacaggttcacaagtcgctcctgcgcatccgcgagcggcacctcgtcaacttcatcccctggggcccggcctcgatccaggtcgccttgaccaagggctcgccgcacctccagcagagccaccgcgtgagcggcctcatgctcggcaaccacacctcgatctcaacctacttcaagaagacgctccaccagtacgacatgatccggaagcggggcgccttcatcgaacagtacaagaaggaggacatgtttcggaacggtctcgaggagtttgacgacgcgcggtaagtcctccctttggccttcgctcggcacaggcagcgccagatactgaccaagcagcccccttttcccacttgccgtccatcaggaacgtcgtacaggagctcatcgaggagtacaaagcatgcgagacgccagtcagtcgatcctctgaggcagcaccgagacgaccgcacgctgacccgaccgccaatctcgcaggagtacgtcgactacgggacgccctctgccggcgccgaccatcgcgagaccgcccgagcttgagcttgccgcttcgacgaccgcacggccttccttcccttcctcccctcacgattatcatgaccactttcccgtttctcatgcgataccacgtgcgcgcgtgccctgccgcttcagcagacgtgctcgagcttgccacccttagcgacgcgcgggccgaggtcgcggccgaccgttcgctcaaagagctccatcatgacgccaaagagcgaccgcgtgagggcggcgtcccagcggcccttagatgattcgtcccggataaaggcgtgctgggcctggacctggagagcgggcgggagggtcagctggcggcgttgggaactagcagatgaccaagtcgcagaaagaccgacctcgtagaactgggatgcggcgagtcagcaaaagtgtcaggcgcagactagactgaagggcaatcagagcaagaaacccaccgagaagagtgagccgccctgctcgagcttctcgcggatgagcgtccgtccggcgagagggacatgcgtgtcctgccggccaaagacgaggccaacctcggcctcgccgaggtcaccctttgcgatccgcgcgagcgagtcgtcggcggcgctgccgagcgtcgacgaatggacgtcggtcgcgaaccagcagaagccggcgaggacgcgcggatcgagtgcgcatcgaagggcctgcaaagacggcatggtcaaccggaccgtagacagcgtgtgcagagcggagcgcgacgaacgaggtggccgccgaggcacatgccagttgtcgcgattcggccggtgcagtttgggagcgacaataggtggtcaatcgccagggtcgcgtcttcgtcgtaggcggccaggaccttctcggcctatcgtgagatgatgtcgtgcagggggagagggcataaacagaagtcagaggttgatgggctgcggagagctcctcgctcgaccgtccaggcgtaccttatagcggttgcccctgtcagtcccctcgacgtcgtacgggagggcgtcgggtccttcccactcatggaagctcgacgggcagacgacaatgtagccctggctggcgatgttggaagcgaactgagagagatggtccgaggcccagggcaagagcaaggtccggtcagctctcggaggtgaccgtggacgcgaccgcgaggccgcagagggcgtacccgctcgactgggcccgtgacctggtagatctcggaaaagcagacgacgcccggccacttggcctctgccagagttccgaacaagccgtcagtcagggaggatcagccatcctcaggcgtccgacctctcgttgcgagccgacgcacgcgggtagtcgggcaggttgggctcgtagacaaagagccgcatcgtcgtcccacccgccgtcttgacgtccttgaagctggccttgatgatcattttgtctgttggcgaggaaggggggaaaggcgatggtgacggttcgcaggcaggaggcgagcggaagggaggagggcggagtcgaccgagacgggctccctccggccgtcaccctcatcctactcgccgccgccggtctcgctccattgtcgtcgcctggctgctagagcacgcctacggggaagaaaggtccaggccacacctagccgagctcaaatccaaaggtcgaggcggcgaggcgttcctcggagccggacgcaagcatgccgctcgctctgccctcgacctcgacctcgtcgtccggcaacggccgggtgtcctcgtcccccggcagcagcggctcgtcctgggaaagctcctcgagcgccagctcgtcgacgggcggcagcaccttcttcgcctcgctctcacggacggcgttgttcatctgggggatgatgctcaagcggccgtcgcggtgcgtgcgccgcaggcttcgactgacgagagccgcagtcgacaagtactgacggggtccacgtccacctgcttcacctttgtcaggctctttcgaccttctcgaagtgcgtctttctggaagtccgtcctgagtgtcatgctgaccgagacgctggcttgcagtctcgtcaattaccttccttcgcgcactcgctaagcgcgacaacctctcgctcagcccgcggggtctttaccgcctggcgcggacatatgtgcgtcgagcttgacgtctgatggcagcggcatgatccgacttacattgtgctatcccaattcagggcccctggtctctcatcctgcccctgatcccacccatcatcctcaacacgaccctcacgaccctcctctttgcttcccactcgggcctcgttgcgcttctttcgacatgcgaccctttccgaccgacgcacctgttaacggcgcaaacgtccagcggcgagggctcaacggcggatggagaagaggagcagatccgctggtggcagcgcgacccttacgcgatacgacacccgacgctcctctccgcgaccgccggctttggcgccggcgtcgtccagagtacactcgcgatcccgatcgaaaagggcgtcaaggtcgtcggacggctgatttctggcagcaaacccagcgcaatctcggcaggcggcgcctctgcagctgctccgccgccgtccactgtagcctcgaaagcgtcgggcggcacttcaagagcgagcgcccggggtaagattcgcaaggatacactcgcgtggctgaaggagctccgaaagtcgggcgtcgcatcctcgttctcgctgacggagaacggcggctggcggcgcatctcaaagctcgggttcgaaggctggcgctggggcgcggccaaagacggcgtcggtgcgtggcctcgtgctcctctttattcaattcgccttgcatggcggctgacaatgatcgcggcgcaatacaggctatgccgtctttttcctgacatttgacacgtctcgccggctggccttgcacgtccgctcgctcgtttcctcactccagtcgacagccgccctgcacccgaagcggaccgccgaccgaccgcgggtccgagcccttttcgggctcgaggacgcgcttggcgccacaggcatcgacgaagccgagggtgggctcgggtacgagggctcaaagtgggcccggacgagccaggccgttgtgcttgtcgcgggtggcatgctcgccggtcagctgtgagtgcccaaaccctttactgcttcaattgcgtcgctgacccccatctcctcgcttgctcgcagcttcctcctttcgacccggccgtttgatgctgtcctccgcctcctctcctcgcccgcccatctgccgagctcttccccaggctcaagaaccctcacccgggcgtatatccgctcacacctccgacacccgctcgagccagcccggcggaaccctaagtaccggacggccaccctcgcggcgagtggcaagccgctgccggccctgccgctcatcgtccagacgctccggagcaaggaagggctcggcttcttcctcaagccagcgagggacgagggttcggcgggcgacctcgcgccaacgtcctcgtcagctgctaggagcggtcgagcatggaagactgggaacgcgctccggaggctcggttggggggtcgtcaagcttggcccttggggcggcgcctttctcgcctttgcctgggccgggggcgaggtctagatgattttacaggacaaagggtgtcattgccattgcgccgttcgtcaacaacagctactcgtcgtcgtcgctctcgctgccgtaccctccgagggcgccggcgaggcccgccttggccggtgctgacggcggtggcggcggcaggttgctcgcttgggcctggagctcagcctccttgcgccgctcgagcaggtagcgcatgccctcgagcgcctcggacccaagcaggccgccgccgtcgtcggtccgtgcgcgtttgctacctccggcagcctcttcctcctgctcggccgacggcatgatcgcgttcaggccagcctcgtcgccgttctcgagcgcctggacgaccgcggccgcctcgagaacctcgccattcttgacgtggacgaccttgctccggagcgcctcgtcgccgatccgctcgatccggcgcttttcgcgcgtgatggccgtcgggttggggtcctcggtcgcccagcggacgttaagaatctcctcctggtcgagcgactggttcatcatggcctcctttgcaaactgggccgcgtgctcgtgcttgtacgtgacaaaggcgacgccccgagtcgccaggatgttgactgtgcagcgagaggagggggcgggacgtcagcgaagaggatcaactcgacggagccgacaaaggagagatgcccaccgcgctcaatgtctccccactcgccgaagtgccggcggacgacggcgttcgtctcgtcccgcgtcgcctcctccctgaccttgccaatgtagagtgtccggttctgacgcgagaacgagccggtcccgcccatgtcgtccttgtagtcggcgtgcttctcgcggccaaagatgtcggtcgcgctgttggggaggatcgccgtcgctggcgggatccggtggaggtagttgcactggacgctgcagtggtgggggaagagcgtgtcagcggacgcgatgccaggatcgacaccttgcaggagacataccccatcggacagcagcccttggcgaaaaacatgcacgagtacttgacgccgagcgcgtcggcccgggtgtagccggcatcgcgggcgaggatgcagcgcgtctgcgacttggtctggctggagccgtcggaaggaggcagcgagcgcgctgggtcagcagacgggcgacgcgtgggagggcatatggtcgaacgtacgcctggaaccggtcggcagtgtcacctccggaccacttgccgtacctggagggtcgagggagcagccggagggcgaggcgggcggtttggaggtcggagcgtgtcgagagagtgcaagagaccgacggcagacgatggagaggatccgtaaaaggacgaggagtcggagaggcacgcagtcagcgagatggatcgacacagacgaaggccaacccgtcaggctatagttgagctcggcaccggccggctcgggttgcggtcggcacgagcttcgagctcgggactgctgcccaacgatgcatcattgacctggccagcatttgccgcccgcccccgtgtattccggacggatctatcagagcagacgctagagaaacggtgacataccagatgtctgagtggagggaacagagcgagggaggccaagtgtcagctcaagccgtccgagctcgtcgagcggctgccgaccggtcgagactggcgagacgtgtccaggcctcgttcatccagcctggacgcgcacatcgtctgccaggccccgcaaccaaacgagaagagggaactgactgaactccttgccaccctgctcgacgacgggcgcgacgatctcgcccggctggacctgtctgcgggcaggcttcaacctgggaagggggaggggatttgtcagcatgctcgagcagtcctgcgagacagaagcgtgaggacggacttctttgcgaccgacatcgaggagaaaccagaaggagaagggcagggaggggtgtggtgcgagaggagcggctcgaggtgctgcttgctggctgctgcgagtcgaggccgcgcgagtcacgctcggccataaacacggtggcgtgactagcgtaaggccgctcgcgcgtcgtggcatcgcccggggacggctgcatcggggcgaacgacgattaactcccacccacaactcctcctcctccttcctctcttcgcctgcaagaacccgcactctcctccacactatgctccctcggtcggcgcgactcctcgcccgctcgacaccaccctcgccggcagctctcaggctcgtttcttcgtcctcgaccgtcggcgccagcctcctcgcccgcagggtcgctccgtcagcagccagcgcagggccatcgaccatcgtcgtcgccagccggtcgtttgcgagctcgtccacgacccggtcggccaagcgcgactgggagaaccaggcagcaggttcaaaggaggctgcaaaggacgaggcagcagcaacggaggagacgaccaccgccgccgcctcgtcgtcgtcgtcgtcgccgccatcggccgacagccggcctccatcggatcccgagtcgacggcagaggaggtgcttgacaaggcggcagacgtgatcaagccggacgagagcgtctcgcctgcggccgttcacgagggagtcctgccttcatcggccggagcttcggcatcggcaaaggcagaggcggcgtcgtcggccgacccggcggcgcctgcggaggccaccacctccacttcttcttcctcgtccgatgccccctcttcgtcgtcatcgtcctttctctccgacccctcttcaagctcggcaacctcgacgagtgcctcgagcagcagcggtagcagtaccgctgccaagctcgccaccaaggcccggcaaaagatccggcgcgcgaaggctgccagctcggctgccagcgtcctggacgctggcggggccgatctcgccactggtgaagctagcagcggtgaggtccgcgacctgccgagctacggccatacacttgtcctcccggtgacgagctcgatgctgccgccctaccgcaagagtgcgtccctgctgccactggccctcgccttgcagtcctcttacctaacgctgcctccttgccctcagactttaccttcaccgagccctcggtcatccgcgctgtccgctcgcttgcatcggctcgcatcgatcagctcggtgtcttcctccttcggcccgtgccctcgtcctctacgccgtccgcttcggccgaggccaacccaaaggtcgagaacgtcgacgtgatcaagtcgtcggccgaggtctactcgaccggcctcctctgccggatcaagtcgtcccggccggggaccgtcacgaggcaggacgacgacaccgagctcgtctcgagctggaacgtcgagcttgagccggttcgacggatcgtcctaggcgaggtcgaagtcggccgggacgcgcccgagactgagggccgcccggtgactgttgagggtgccgagggtgaggcgtcggcgtcggagccggcggttgcccggtcgacggcggccgaggacgttgaggaggagggcgagggcgacgtcgcgagcttcgagaaggtcgacagcaaggccgaggtcgaggtcgccacgcgtgcgtctcatcgtctttcctgcgctctaatcctttccgcagatggctgacttcctgcctctgttcacagccgccgacccgcttgaactcctgcgcaagcacgccgtctcgatcggcgccatcacgcacgttgccgagccttcggctgacgaatcttcgtctgaggtcaaggagctcaagtcgctctacatccaggacctcaaggactgggccggcaagtcgccccaggacgtccagagcgcgatcctcgagctctcgcacgcctcgggcgggaccgacttctttcatcggaagctcgccgaccagctcgacattgtcgccggtctcgcgcctcatgcgaccaacgccgaccggcaggccgtcctcgacgcgaccgacctcgctgcccggcttcgggccgtcctcttcatcatgaagaaggagctgtacgacattgaggtccgtaacaagattcaccgcgagatgaagcagcggctcgacgagcgccagaaggagatgatcctcggcgagcagatgcgggccatcaagaaggagctcggccacgacaagggcaacggcaaggacgagctcgtcgacaagttccgccagcaggccgagggcctccggatgccggacgaggtcgcaaagacgttcgaggctgagatgtcgaagctggcgatgctcgaccagaactcgagcgagttcaagtacgtctgccgttttgactcttcgcacgatgttgcttttagctgatcttcacccaccttgttctgctttagcgtcgttcgcaactacctcgactggatcgtctcggtcccctggggtaagcgcaccgtcgactcgttttcgatcccgtcctcgatcaagattctcaacgaggaccactacggcctgactgacgtcaaggaccggatccttgagttcctcgccgtcggcaagctccgtggcacggtcgagggtaagattctctgcctcgtcggcccgcccggtgtcggaaagacgtcgatcgcaaagagcattgctcgcgcgctcgaccggcgcttctaccggatctcggttggcggcctgcgggacgtggctgagatcaagggtcaccggcggacttacgtcgcgtgcgtccgagcgccaccttgcgcctatcgccccgcaccctgtgctgacctctttctccgcctcgcagcgccatgcccggcaaagctgtccaggcgctcaaacagacgcaggccgagaaccccttgatcctgattgacgagatcgacaagatgtcgggcggcgccggcggcggcgggggctcgtggggcggcgacccgtcgtcggccctgctcgaaatgctcgaccccgagcagaacggcgcctttacggaccactaccttgacctgccggtcgacctgtccaaggtcttgttcgtctgcacggccaacatgctttcgacgatccccgcgcccttgctcgaccggatggaggtcctcgaggtctcggggtacgtctcggaggagaagcgggcgattgcaaagggctacctcgccccgcaggcaaagaagtcgtcgggcctcgacaaggccgatgttgaggtcgacgactcggccgtcaccgccctcatccagtactactgccgcgagtcgggtgtccgaaatctcaagaagcacattgagaaggtgcgtcctcttacaggtctttaacgttggccggtaacggtcgctgactctgccttgccgcacgcgtccagatctaccgcaaggccgccttcaagattgtcaaggagctctcgcccgacggtgttgagcctgcggccgctggagccgagcacccacccgtcgaggtcattgagccgaccgccgccgacgctgccagcccctccgctgtccagggcgccgtccccgagccggccgtttcgtccaagacggccgctcaggcgacctccgagtcggtctcgccggccagtgctgccgacgcatcgacgacgctgccggccggctcgacgacgctacaggtcgtcaagccgctcgaggtcccggcctcggtctcgatgcgcatcaccaaggacaacctcaaggactatgtcggcccgcccgtctaccagaaggaccgtatttacccctttgcgcccccgcccggcgtcagcaacggtctcggctatactggcaacggtgccggcgcgctcatgccgattgagattactgtgcgtctacccgtcttcagtctctcgcccttttccttgccaaaagctgaccgatgcgtttcctctctactcaggtcatgccgggtaagggctcgatccagacgaccggcaagctcggcgaggtcatcaaggagtcggtcaacattgccatctcttacctccgggccaacgcctttgcgctcggcatcgccgtcaacgagggggacattgtcctcggcggcagctcggaccgcgacatccacctgcacatgcctgagggcgcgatcggcaaggacggaccctcggccggcgtcgccatcctgacggcgctcgtctcgctgatgaccaagacgcgggtcgacccagacattgccatgacgggcgagattagcctcggcggccaggtcttgcctgtcggcggcctcaaggagaagattctcgccgctcaccgggccaacatcaagagtgcgtccagcgagggtgtccttgctctcttgcgcctcggctgacacctgtctgttgccgtgcgcctgttgcagagctcatcgtcccccaggcgtgccagggcgacatcgaggagaacgtccacgcttcggtcaaggacggcatcgacattgtctacgtctcaaacgtccgcgaggttctctacgaggtctttggccagctgcccgtcgccgagtcgtggaaggacaagtacccgctcctcgagctgtacggcgccgccgacggcgctgcaccgacctcgccctcaaacactctcaacgcctcatagagcttccctcccttctcacctttttttctcgacgctctctcgctcccctacacgaacgaacctatcttgctcgcacctccttcccctctgccgccgttcccccctggtccccgctatccctcttgtaccttcgcgcgctgcccgaacccgcgcgttctgcatgtaaaccccgatctccctccgaccgatccgacctaccccctttttcgaatgcatgatcctcacgagtcagtgaattcgcgctctccggaaagtgcttgctgacggagcgacgatcggcactaggagcaaccgggcgagaggggagccttggccgctgcgcgcgcgctgccgacccaagacggccgtcgagctctccaccgccgacactttcctctccaccatcacctttcctcccggcctcatcacctgactctcctctatcatgtctcgcgtcggctggctcaagtcatcgacagcctcctcgcgcgcgtcctcaccagcagcatcgacctcaggcggtggcggtggtgggcggcgctcgacgtcagtcgcgcccagcgccggctcagctccgacctcagccggaggcccgtcgtcaagctcgtcgctcctgagctcaaaggcggcggccgttgtcaacctctacccacagatgacgaggcccgacacgagccggttcgaagacgagaagaagcgcatctctgagttcaaggtgcggcgtcggctcctctccgaggggactgcctccccgtcgcgcactcgctgaccgagctcgcgcccgaccttgctcgcaccagacggcggacgaccagtgcccaatctgccggtcagaccgctacctgaacccgaaacttcggctcctcgtctcgacagtctgctaccacaagatgtgcgatcccgcagcgcgcgagctcccgtcggcccgcagcggccttactgaccgcctgtcgctctcttccatcaggtgcgagtcatgcatcgagcgcatcttcaacctcgggcctgcaccttgtccgacctgtggcgtgctcaaccgcaagagcggtttcggcggccagaccttcgaagacctgaaggtcgaggaggaggtcgacatccggcggcgcgtcgcccgagagtgagttccgggctgtctgtcgcgttgactgctggtcggtccatcgacacttactcgccgctaccctgccgcgcaagcttcaacaagcggagagacgactttgtcgactcgaagggctacaacgactacctcgaggaggtcgaggacatcagtgcgtctcgaccgtggtgcggaccacgagtctcgctgactccttccttctcttgccctctctagccttcaacctgctcaacgggatcgacctaccggcgacgcatgcccgcattgcggcataccgggcagcaaactcacagtcgattgccgagcactcacagcgcgacgaggaggatgcgcgcgatgcccgcgagcgcgagcgcgaggagagggaggagcgtgagtggcggcgcgacaagaagcgtaaggaagaggtcgagcgtgaggacgaggaccgaaagtggcggggcaaggtcctgcgcgatctcgtgcgtcctgctcgcactctgccgccctccttctgttccgttccgctagggctgaccggctgtcggatcgcctcgcaggagttctcttctgccgatgcgtcgtcgatcatgtcggccacggcccggccggtcgaccgtgcaccctctccgccgtcgctcccagcctcgttgcactcgtcccgcctgcggagaacaaagcaggccgccaagacgaacgaaccgccgccgccctacgtcgacccgtacgacgactactccggcaagattacgctgctccacaagtacttcgacccggtgcgtatctctccttctttacggctgctacgctcagactgacttgttgccactcgccccccgtcaggtgatggcgcccttcctcgacccgtcgaagaatgtggcgtggctcgccggcggcttcaaggtggccgaggtctgggagcgtagcctacgctttgcggtcggcgggctcgacgtcgacgtccttcgcgacgaggaaggcgaaggcggggccgagggcatggtcgtcgactgaaagcggcgagcgtccgtccgagagggacgtctctcgacttgttgcaccggcgcctcatgtcatgcttcccccacactccacccttccagcgctggaagacaaaaagacatcgcatcgtccgcgccgtcgctaggcgagctcgacggaccactcgtcgcgccactcgtcgtcatactcgtcgattaaggtccggttgaccgccttgagcttggcgatctcgacgagccccggcgtccggcgcgactcgtacgaggcgaacgagacgtccttgtaggccgaggacgtactaaggccgacggagcgcacgatgggaagcggctcggcgtcgacgagaacggcccggcagacctcgtcgatgaagaggcggtaggcgtccgtcgggtcggcaaggaaggtcggctcaaggtcttctccgtctcggccgtaccgttgccccaggcgtcctcccccaccgccgtgccctctcacccgcctccgtctgctctcccgcacgcaactcgccgtcctcctcccacgttggcgcgagcagcgcgcgctcctcgagcgcttggcttgcgagcaggcgccgggcgagctgctcctcccttgcgcgaagcgccgccgccttctggtccttgatgacgcccttgacgcctgttgcgcgcgacgcgccaacctcatcatccgctgcccggggcgaggagggcggcgagtagtcgctgccgagctcgtcgtctgtgttgggctcgggcgagggcgtctgccggtcctcttcgcggaactcggagacgtgcgaggaggggtcgcggaaaagggcgcccgagaggacggcctgttcgagcgtgtcgtgcgacatggctgctgaagaggttcgaggtggaaagtgggggtgggagtcgggaagagaacaaggcgctttggctcgatcaaaggggcaacacaacgttggccgactgcagcagacagtgacctcgagctttcacctcgaccttgaccttgaactcgacttcgacccatgcccgtcatacggcacaggacgctcaacgtttacgtatcgcccgacgcctacgtccgtccgctacctccgtttgcgcgggtggctctcgctgtctgcgcctcgctttgcctcgacgaacgcgtcgagctcgctagctcggctgtcgagctcgcgtccagcccatcttcttcagctcacagctgatcctgcttctccttcgcgccgcaggtctttgagccggtcaacggcgatttcggcttagagaaggacggcggtaacagggacgtgctcgtactcgaccggctgacgggctcggtcgttctgaaccgtgcgtttctcaagcagccgctgctatcggcagccggccaatcactcaacctgaccctccccttctggccgctagcaccgaaccgctcgatcccgctcacccacgaggccgtctacaccgttcacggcatcctcggcatcgtctcgctcgccctgaccgaccacctgatcctcatctcgcacctcgcaccccgctcagcacgcttcctcgggcacgacgttcactcaccttcggcctacctcattctccccctctcgtccgccgcgtcgacgtcctcgtcagcgtacgaggctcagctgctcgccctcgtccagcacgcactcgacacaaccccgctctggttctcgtactcgtacgatttgacgagctcgctccagcgccaggcggccggcgaagacgtcgacgagcgcttcttctggaactatgagctgacaaggaggctcgtcgatgcgggacctctcggcggcggacgacggaaggactccatcatgcccgatggaagcggcggcggaggagtacggccgattggctgctgcccaaggccgcgtgcgcgctgaccttccgcctgcttcgcgacagatcgccgccttcgtgctcccagtcatctgcggctgttcgtccacctctccgcacacttcctctcatcctccaaactgactacagctgctctcgatccgcagcgttcgacctccgggccgtctcactacctaacgccccgccgctcctcctcctcctcatctcgcgccgctcgcgccaccgacctgggacgcgctttctccggcgcgggatcgacgctcaaggcaacgtcgccaactatgtcgagacggagcaaatcctcgtttgcgatgcgcaatcgccgcccgagagcgacagcagcgagaagacggccgagccgggcgtcgacgcagggggtgagggccgcgtcaagtgctcgttcgtccaagtccgggggagcgcgcccgtcttctggggccagatcaacaacttgcgttacacgcccgacctactcgttatggatctgccgtcgacggtatgtctcagcccttccttgctcgacctggtccgtgctgacgctggatgaacgtgcgaccctcagaccgacgccctccaagcgcacctcgactcgcagatcgagcgctaccgcaaagtccacctcgtcaacctcgtcaaccaagtaaagtacgagcggcccgtcaaggaggcgttcgagaacgcgctgctgatcctcggcgaagacgagagccgcgcaaagtactggtactgggactttcatcgcgagtgcaaagggatgcgctttgaacgggtcgaggggctcgttgtgaagttaagggaggaggtcgagccggagggctggttccggtgggacggcccgctgacggagctcggcatggggcggcaacagccgatcaggcagcagacgagtgtcgtccggaccaactgtgcgtcgtccttctcgatcgttgcgcggcatgtccgcatcctgacccgggtccggccccctcgttccaggcatggactcgctcgaccggaccaacgtcctccagtcagctctcgcccggatgatgctcgacctccagctgcactccctcggcctcctcggcgcaaacgactcgatcacccaccacccttcgtttctacatgacttccgctcggcctgggccgaccacgccgacgtcgtatcggccatgtactctggcacgggcgcgctcaagaccgactttacgaggacaggcaagcgctcgtggcgcggcgcgctcgaagacggcagaaggtcgctcgtccgttactggaagaacaacttttgcgacggcgagcgccaggtccggccagtctggcatcgcaatccctcttcggtcgcttggctgacgatgacgctcgctcgctgtaggacgcgctcgacctcatcaccggctcgtggaagatccggcgaggcacgccttcgcccttcacggacgaccggctctactcgatccaactagtgcgttccctcgtataaggccaccccttagcgtttgctgctgattgccggattctcctcttttgacctggcagatgccctgggtgtttgcactcgcgctcagcctcctcaccatcggcctctgcagctcctgtacgccatttcggcctgaccgctggtctcgcatagccgctgacagtcaatcccatcgcttctgcagacaagggcatgcttgaggtccgctcgcgagcttacatccacctcccgctgctggcgctcgtcgccctcctctcattcacctacatctgggccaacggcacgcagtgcgttcttccttgagcgtttcacatgaccaactacgctgacgagactctgccatcgcgcgcctcaggtacgtcgactggccccgcctgacgacctacgaccccctctcgtacaccggcccaggacaccggacgacaccccgcggacgtggctcgcgcatccttccgcggtcaatgccttccctccttcctgccgcgctcactcggcgtctaccttggccctcttccgcggcgtcggcactctcgtctcgtcctcccaagccaccgtcggcacacggcggcggcctgtcgagcggccacagcgtcggcgtctcgggcacatgggcgatgaccgggcccgactcaacgctgagcagcggcggggtcgttgaggcgctcggcgagctgggtgggacgggtgcccgtcgcaagggtcggacagaacggcacgactagaacgagagctttgctcctggtactcgcgattggatacatgtgctgaacctccttacaagctgtactcgtcgtcgctgtcacctcctcgttggtcagcagcggatgtacgagtcggtgcgatggacggagggtcccggccgaacgacagctcgttatcaaggaacgaccgggacaaggaccgacctcttagctggcggctgacctcgttctcccctttgaccactactctcttttgcctctcgcctgaccctcgtaccgtctcagcacctttgaccaagtcaaagcggtgcgttgctcaactcctcggttgttgggctcgccttccgctctgctatcgctgcaggaccggcgccatcgaggctgatctgaaggagaagcaccacgcgcccctgaccgccgacgagacagaggccgcccagtacgaccagcagctcgtcggggtccagtgcaagcctgcctgatcccacctcgcccagttcccttcgctgtcaacctcgctcgtccttcggccggccggacgaccgctctccagccttccgccatgcgtcgttcgaacttctctacaccctcgtttcagacctgccatcttcttctcctcctcactctcgtgatgtttctttccgttgagcttgaagaatgtgccccgacggtcgtacgcatcggtcggtcgggcgatggctcgcaggggtgacgtagcctgctgtgcgcgggagctgcttcgatctgctcgtcggtgccgatgctcagcccaaagcagcgggcccgcctttaactcctttgttgccacctcctacccatcaaccccatcctcacattgcccactatgcccggcaagaacaacgttctcatcctgctctttcgcaagtgcgtcctcttgcttgccgactcttgtgttgagcccaccctctcaggggtcgcgcagctgctcctctccctccgatcctcccgacgacgaccaccctttgctgacggccacgatgcctgcagcgacctgcgcctgcacgacaacccgctcctccagctcgccaacgcgcccaaggcgacgacacacgtcctcccgatctttgtttttgacgaccgcgtcgtcgactgctcgtctctgcccggctggaagggtgagcggggcgaggcgacgagccgcgtcctgggcatcgctcgatgcggcgccaatcggaccaagtgcgtgtcatttcccaacttgactcagctaagagagccgtcgtactgacctggcggtccgatagatttctcaccgaggccgtctttgacctgaaggcgagcctgcagggcaagcttcaatcggatctgctcgttgcgttcggcaagcccgagcgaatcgtacctgcgctcgttgagcagcttcagaagcagggcatggacgtcggcgcagtatggatcaactctgaggtgtgacactttactcgcagagtatatctcggcccgctggctgaccgccatgcgctgtttcccaccaggtgacgacggaggagaagatgatcgagcgccggctgtcaacagcgctcggcaagctgtcatcccgggtcgacctgacgcagattgacgacggcttcaagacactcgtccacccggcagatgcgcccttcccagccaaggagacgcccgacgtcttcacgagcttccgcaaggcggtcgagggtcttggcgacggtatgatccggccttgcttgccgacgccgacgtcgctcccgcccgcgccacgtgtagaggacgtcacgtcggtcctccggccgcccgatggcaaggacaaacttgaaaacgtcctgccccacctgctgaagccatacaacggccaggcggccgagttccacaaagactcggcccacccttacaagggcggcgagtcggccgcctttggccggcttgagcactattgtgtcgagggcggcaagaaggcgccgctggcgtcgtacaagcagacgcgcaacggcctcatcggacaagactactcgacgaagctgagcgcctggcttggcctcggctgcgtcagcccgcgccgggtggcgcaatacgtgcgcgactgggaagagcagcacaccggcggcaagggcacgaaagactcgtgcgttggccaatcagctcgtgactggcatgcctcatttctgaccaaagctcgatcccccccgcagctattggctcatctttgagctgctgtggcgcgacaactttacgttcctcggtccaaagtacggcagcgtgcgctcgtgtgctcttctcgccagctcgctgaccggtcgtgcccgtcgtctgctgcagatacgggtcggccttcttccgcgaggacggcttcaactcggtctcgcggccgggggctaacaaggaccttcactggaaatactgcggcaagggcgaggccggcgctgcgctactcgaccgctggcgcgaaggcaagacgggtgtgccgtttatcgacgccaacatgcgcgagctcgccgagacgggcttcatgtcgaatcgtggccggcagaatgtcgcttgttacttgacaaaggacttaggcgtcgactggcgggcgggcgctgaggtgtttgaggccgagcttgtcgactacgacacgagctcaaactggggcaactggcaggtacggcggtctcccgcgtccttgagctagggaatccactgttgacactctcgtctgccctctcgcctcgcagtacgtcgccggcgtcggcaccgacccgcgcgagtcgcgctacttcaacccgatcaagcaggccaaggactacgacgcggagggcgaatacgtcaagctctggctgcccgagctcaaggatgtcccggccgagtatgctcaccacccttggacgttgccagctggccacccggcgcgcaagacggtcgacggcggcctctacgcccagccgccgagtgaggagcgcggagcctggaagggccagtatgagcggcgagtcggcgcgcatggaggcggtggtggccacggccacgggcctggtggcaagcctcggggtaagggtcccggtggtggccgtggcgggcgtggaggaggtcgcggcggccatgagggtggcggcggcggcggtggcgatcgcggcgggcacgagaacggcggtcgtagaggtcacggcggacgcggaggccgaggggttcgcggtcgcggtggaggtggcggcggcggcggcggcgacggaggccactagacgtcttctatgactgcccagctaacatcctacaagcgctggcaggtttggcatcggaggttcggtcggcggctgcgcggatgctcttttgtgcgacggcagagacggctctgtctggcaggcattgttggttgttcgtcagtcttgccggagaggctgcctgaactagcgttgtcgcgacacgtccgaccctctgagttgaccgacagaagagcgaggtgagaagtctgtctataagcgagcgactcgctgtctgcgctgcgacccgctcgtctgggtcgcgtcgttgtcggaaccgcccgccttctctcctggccacgaccttcgactctgcctctcccccccttccagccggctggcaggacaacaagcggccttctttgtctccctgcctgcatgtcttcccgttcgtcggccgcgccggccctccatctcggcacagcgccggccagggtgcacgtcgtccagcgcgccccttcacaggagttcgatacgacgcaggcggaagccacccgaggccaggcggccaccggccgcggccgcaaagacagcctcgagagcacacggagctttgtgcgtggcccttcctgcctctcgcttagtttgacgtcctccgatttggctcaggctaaagtgaggggaaagggagggcactcgtcggccacgggagggtccaacaggggaggcacgtaattcaacctgaccggcagctcaatcacacctggccgagggcttcagctggcctgaaggccttgatgcagaattcctgggcaaagcctctcagcctgagcaggaacctatcgattcccagccaggctgctccaggcagaccttcaaagggactgttttgacacgagcgcacacgtcacatctacccaccagccccctttgatcccttgccgggcgacccagctgctgatccggcggtcctctgcagtacaacctcccgtcatcaagttcgctccccgctgtcggcgtcggccggcagtcgccgacaccctcgagctcctccttctaccaccagcggcccggcgcgcgcctctcggctggttcgcttacctcgcccggcccacagacgtccgctctcccgaccgggccttccctgggcgctcccggtcgccagcctcagtcggccttcacatcgggcgtccttcccgcccgaggcttcttcgctccgcagaggccaggcgacgctcggcggttagccgacccgagcgcggcagccctgcgcacgtccgagtcgatcttgttcagcgcggccggcggcggcggcggcggggtcgagatgacttcgccgagccggtttgaccccaagcctctagcggcgacgacgagcgagacgtcgtttggccagtatgcctcgtcaaggcagccttccgaggacggctcgatcgatccgtcctcgacgcgggagctgcgcgcagctccctccccgtcgggcgtgcagactggctctgtcgcgtacaagggcagccgtgagccactgctcgactaccccgtatcaggagcaggaccttccggctcaccgcggctccatctcggcgcctcgcccaagctctcactcggaggcggcttcgggacgcaagccagcgagagccgcaaggggtcggcggcgacggcagggattggcgggtcgccctatctccccccagcagcctcgggcagtcctcgaccaggcacgcaaagcgctccgccgcggtccaatccagtcgagaagccgacgaagcgcgtcagggcctacacgctgcacaactcagccaacgcctttgcgcttggcggcagactcgtcaccggcggcgacagctcgcccttcccgctctttgcttcgatcctactcgaggtcggcgtcggcgccgtgtggatcgggacgacgggtgtcgggctctggcagaatggcgtccgaggagacggcggcaggggcgggatcgttgtcgtcgtcatctttctctggctctggggcatcagccttggtgcgatgctgggtaccgtccgtcccgccctacccactgctgcgcttttaggtctgaaagctgacccatctaccctttcttcgccaggccttccgggatccaggcatcctcccgcggaacctcgacccctcaccgccgcgcgcaccgaccgagagcacaggctcgctcgtcccgctcccgcgcgacctccgcgtccgcgccggccgggtgattgtcaaatactgcgaaacatgccggatctaccgtccgcctcgagcgagtcactgccggattgtcagtcgccccaaccgtgtccctttgcgtctcgcctggagctgacgaccagccctcacctgcggctgttctcgcagtgcgacaattgcgtcgacggcatcgaccaccactgcgcctacctccacaactgcgtcggccgtaacaactacacgtcgttcatcgcctttctcgtctttaccgtcctctcgctcgcctgggtcgccatctggtcggccgtctacctctggcggacggccgtctctcgcgaacagacgttccgcgccgtcctcggcgacgaggccgggagcggcgtcgtcttctgcctcagcctcgttctgctctttcctgttggcagcctcatgtcctaccacgtctgggtgcgtagccataccgccgtcctgttgccgtcctgttgccatccaggcagaccagctgaagttgaatcttcccgcttgcagctcatgctgcataactcgacgacgatcgaagagatccgacggacggcgcagcgctcgatggcatcgaccaacccagcgccgccctcgcgcctgcacaagctcgcgccctgccttgcgtcggtcggcaacaacggcggcgctggcgaggcaaacccgttcacgtacggtcgctggcggaccaactttagccgggcgctctgccgaccgcgcatcggcagctggatggcgtttgcccactgggtcgaggtgcccgtcgtagaggagggcgagacgtgggacaagcggcgactgtagcctgcctgacttatacaggacttcttaatgacagacgtgggcgcgttggaggcacaggttctgccgaagcagatgcgcatgcggcagctctctgtggctcggtcggatccgatcaactcgcatcgccctcgccctcgttcatccactacgtctcgcgccgtcactctccgatctgacatcgcccatcagcctgctggcaagacgcgcttcttgactcgctccagacccatgagcggaaactcggctgtcagcacgaccagcttaccggcctcgagctcaggcgcccccttgagaccctggcccgccgcccacgggcctctgcaagccggcggcgtgtctctttgctctgctttcactcggagcggcctagagtgagcccttacttgtcgtcgctcaagcttgttctcagctgctgacccttatcgagcgctcgacagaggctctaaagccctccggcggaagcgccggtccaagaagcagccacgggtgacgctgccgtatgacgtcctcctccaggtctttgtccacatcggagggcggacccactatcgggacggctcaagggactggacggctgcccggtcgctcgcccagttgctctttggcctctgcctcgtcgcgcgagacttcaaaggtgcgagcgtgctgacaccgaaggcttcaacagaccaacgctgacctgccctcactcgcctctcagactactttcagcccctgctttgggccgaggtcccgctcggtaacgtttctgacaaggacgagcgacaggccatcctgtcctttatcgcgacagcgcgggcgaggcaggagctcgccgcacgcatcaccgctattcggctcgtcaagccgcaccggccaccggcaggccctccgtcggctgagagcatcgacgccgacaaggcgctcgagtccctctgccgagcactatcgcgcttcccggccttgacctcgatcaacctgccgggcgcgatggtcggcgcctacctcgcgatggagacctcggacgtcccgctcctctcggccgtgaccctttcaggcccgccgtcagatgccttccttggcctgcgtaacctccagacagtccactcgctccgactcgatcacccttggctggcaacgcctgcctttcttgaccgcgtccacatccaactcgacggtctgacggcactccatcttcagcacttttcgctcgcaacctcccacccagcgctttcgtttcttctcggcgggccgttcggcaaacgattgacagagctgagcatccagctcagcccagaaagcccgtcgccgggcttctcgacgcacctcctctcgctcgtgcccaaccttacctacctctcgctttcggccgacggcgtcgacatcagcaacctgcccctccttgcccacctctcttggctccatcttcaccactcgcacctcgacatgcgtcagaccgacgacctcctcgacgccatcgctgcctctcgttctgctgacgtcacgcatcgcccattgactgcgctctgtgcggtccagctcgatggaaagcccggggcgaggaagaccctccggctggccgaggtcggtcttgcgctccttggtccggacgacgacgtcctttttgatcagcagcgggtcatcggagctaagctggacgcctgcaggcgagggcgggtgaaggagacggtacgcgagctgaagaggcgtcgcgggggtggccgcacagggcagcaagctttcgtctcgccaggcattctccaatgagacgcgggcggtgcagcttttggatcacacatcgatgattatctaggacttctttttgacctcgcgctcgccaaagccaaagcccttgccgaagcccgagcgcttgttcttcttggtcccggcatcgccaaattgctcgttccacttccgcagctcgggcagcgcgccgagctcctcggatccagagctggacgagttcttgagcgcgaatgcaaagtgagcctgcgtcaggacgcgcggttttggcacttgcgtggccgacggcgtcgagggcgactcagagtcgcccgtcgggcccgcggtctttggggtctccggtgtcgttgttgaaggagcgacagtctcgccggcagctgatgtctcggccggggtagcggtgctggcctcggatgctggctggatgacagccgatactgagctcgacgacgacgccgacggccccacatcgtcgcactcgaggagggcgactcgctcagccgttgagcccgaggtagaggcctcagtcgtcgcaggctccgcggggacggcgacaggctcaggcgttgccggctgcatcggctcggccgcaactgggatgccgatcgttgccttggccggcttggacgaggagggcgaaggcgacgatgatggcgtgttgccggcgaggggcgtggcgccggcaggctttttggcaagccagggcacgctgaactgctccttgatggcctcctgagcggccatgacgcagagatctgcatgaaagtcgagcgcacatcagcgaagacagtctgacgagaaggatcgccggtctggacgaacgcttcaggtccgagccggaaaaggtggccgtgtcctttgcgagcttggcgaggtcgacgtcgttggccagggtctctgtcttgagcaaaagacggaggatggctggagggagcgagtcgaggagggttcgtcaacagctacgacggaggagcagacggagcgaagctaagacgaaccctcgcgctccttctctgctgggaggtcaatcatgagcctgcgtggaagccgccggaggacagcctcatcgaggtcctggggccggttcgttgcgccgacgatcgagagcatctggtccttgttcttggtcgccgaggagaggccgtccatctcctgcatgaattcggtcagcatcgcccggcgggcgctgtcgccgccgccccttgagccgccggaccgagcctcaaacagcgcgtcgagttcgtcgataaagacgatgcagggcgacagcctgcgagcgaccgaaaagacggccttgacgagctctgagaaggggagggtcgcaaaagcgtagtcagcgtcggggcagctcgaaattcaggtcacttcgggcacgcactctcggcctcgcccatgtacatgtcctgaagcagcggcggaggtgggttaggcgtcagagtcaggattcgatggcagctgagacagaagcgactgaccatgacgtcggacggctggatcgacatcatccgcgcgccgctctccttggccagggctcggactggacgtgtagagagaatgacggtcagcagctgcatgtgcagcgagaaatacgcgtctcacgacgtaccgactagcgtctttcccgttcctggaggcccaaagagcagtgcaccagaggttgcgtgattcttgaggactgccgagacatcaaagacgtcagcgaggcccggacgcggtgaccgtgaagggcagcgacgaacttccggtcgagaatgcctctgggaagaggagcgggagcgagacgacgctccgaatggcgtcaatcgtcttctccggcaaatggacgtcgtcaaagccctcgcgcagccgacgccggtcgacaatcgtcgagaggacctttttctcgtacttgttgagcgacgagtctttcttgagcgcctcgacgaccggatccggtgcgtcatccttctcctcgaccttgagcttgctattttcggtcccggacgacgcgctcgagtctttggcctcggcgtctgccaactcgggctcaaagagctcgagatagtgggctcggatcgcaaagtcgcgcttggcggcggcgatgagctgctgccaggtgatcggcacggcgcccttgtagaccagggtcgaccgcacatcccgcgggcgctcgacgggagcgtccgaaacggtagacgagcccggctgcgccttctcggcgatcgactggccgacagcatcgcccgcgagccggacgacgctgtcccagggcaggatcgaggtgacgacgtcgtactcgatcgtagactcgtcggccgccgccgtcgactttgcgtccggcttgtcctcggacttcttctccgtcgcagctggagtcgttgccgtcttccaggcgtctgcgagctcccgctggacacgtccaaccgagtcgttgaggccgccagcgtactcgccgcggctgtcggcgagcgccatcttgatgaggagctcgttaatgagcgcgcgctggcgaagccgggcgagcagggccgcgcgtcgctcgggctcgtcccgccgccgggggtagacgccgaccatcttccagatgaccttctgtgggccagacgccgactggccgccgccaaaggatggcgagccgccgccgacagagaaggggcggaagccgctgctgctgccgctgcccccgttgccgccgttggtgatgccggcgatcaggtccttgagcgggccagagttggccggtacgaaaggaaactccatcacggcgacgttgcccttgccgaggacgttctggagcatgccgggcaggctggcgaggttggtcgagcctgctccgccgccgacaggagagagcgagccgccaaagaagggccgaattggcgagccaccgttggcgctgtagccgcctgccgaggagaagggtgggatgagcgagccccactcgccagagaccatcttggcgagtcgggccttgaggacggcgctctcgcttggcgtctcctcgggcggcccagccttgagcttgtcgatcggcgcctcgagcgcagcccgacggacaaacacggcagggacgtgggccatgatctccttcatccgcttcgtgtgcttctcgaggtagcccggccccatgagctcctcgagtcccggcggtaggctgatctcgccactcggctgcggtagatggaagggcgagatcgggtcgagcaaggtcggcccaaggccgaggacgatcgaggtcgggttaccaagtgcccgccggctgagcgcagcttgctttaggcacgagaaccagccaagaggggtgtcaaacgtctgggcgacgaggtgggcgtttttgacaaagatgaaccgcgcaagaccgtctttcgacttgtacgaggttgtcgaggctgcggccggcgcgaccatcatctcggaaaagagtgacgagagcttctgctcgctcggcgagggcttgtaggccgagatcgaccttgctcggccgtttaggggtccgctttctgaccgcgacgagcccttgacgacatcggccggcttgtcctcgatccagcgcttgcggatgcgcgagttgcgcgtgtgctcggacgcaccgacagcgtgctgggcatggtcgccacccaggtcgccgctcgagggcgcctcgatgaagtagtcgtcgtcctccttgtcatcctcctcgtcgaacaactcatgctcgtcctcgtcttcgtcgatctcgtcctcctccgcgtcgaagcgagagatgcccgagccgctcgccttggacgaatgcactgacgcctggttattagtcgcctcgcccagccggatcttaagcgggtttggcgagagtgagattgccgacgtggctgagaagggatcgtacgaacgtcagcacatggggctggagtgagagggccggcctctcggtacgcaccgcgaccgagcgagccctcgccctcggcacagagctcgacggcgtcgaggacgacgagctcggcccctagccgaccgacaacctccctcatcgtctttgttgccgtcaagccggcgtcctcgactgggcagtaaattccgacaacggggtcgccattaacctcggtcgtcaccgactcggtcggcccgacgagcaacgacgagcagagcgtcgccgaaagcgtctcgaggacctcttctcggggcaggagcatgctcgccgcctcgagtcgctcgactgcagcctgagcgcgcgagggaaaggctggtgacggcgatggcggcggcgcggtggtcgagctgtctgcctctgccggtcggacctcggcgtcggttgcgacagggctctcgccaccctccgctgccgcagccgccttagcctcggccagcagaaccgcgtgaggcttggggacgctgatgttctgctcgacccagcgcgcaggcagcgtgagcctctgtcggcgtggagggtcgtgcgcggtcgagctctcgtcctcgtcctctcctgccgtcgccgttgcccgagcgggttctcgactctggctcgaattggagatgtacctgggctgccgcgggtagcttagcgcaggcgacgaaacgagcgctcgacgtgaagcggcgcaggcggtcgagaaggctggccgacgggcgagcgacgaggtcgatgcgagcgaggccgtcgctcgccgagagcagcgtgaagggagcatgcgccgagtggttcacggcaggagccggacgaagaaggtagcgagtcgaccagtgaacacaggcgagctttaggacagggcggagaggcgtgaaggaccgtgcttgaagaaggtgatgaaaggaacgtcctcgagccggagtgctgacgagccggctggacggcggagtagggccgagtggaggagcgctgttcaccgtccggccaagtcagctcgtctcgtcctcgtctgaggggcagcgaggcgacagaaattaatgcagaatgacgtactctagggctctggtcgatcgtcgaccttgcttctgatgatgaagggcggtaagggtagagccgggtcgtcgtcggtggcctggcagttgtcgagcgccgtcgagctgaaagcagcgtcgacccgaccgacggccatcatctccatcgcctcatttcctcagatctagcagaaaagcatgccctacaccgacatctcatctgccaagcgtgcgtccagaccgactgcctggtcgtcttcgcgagagggctgacagcttgcctcgctccctgccgatcgtcggcgcgctccgaaccgggatgacgctcgtcccctccgccgtcggacccttgaccctacctctgcccaccatctcgtttcgtttaccctctcatcttacccgccgggcgcgcgacaccgcattggatcgcagactttgaccaggtcgtggccgaagccggcgacaagctggtcgtcatcgactttcatgcgacctgtgcggccctcgaccctccctccggctcacctcgtgcctggacccgaccttctgctgactcgttgctcgcttgttgggcttcccatcgcccgacgtagggtgcggaccttgccacgcgattgctccggcctacaaacagctttcggacaagctcctgcatgcgaccttcctgaaggtcagtcggacaggcgctcctcggattgcgctcgtcaggtactgaccctcctcctgggccttccttcgaatatggaggtcgacaccgacaaggtgcgcctctgacttgtcgatgtaccgcgctttacggcccgcacgactgactgtcggctcacatctccccttatccaggtggccgccgtcgcccagaagttcagcgtccgtgcgatgcctacctttgtcttcctcaagaacggtcagaaggtcgacgaggtgcactctttcacactcgcacgacgccatcctagagctgattagccttcactctggcaggtaggggcaacctctgctgtcagctctaagcgactcggagcccactaaggcaaagagaaggggaccgaccgagcacggtttgccattctcatccaggaagccgcccttcggcacctttggcccgccgaccggcgccttgtcgcgaggctcgaacgggatgccaggaaatgagctcgccgtcggcttggccggtgcggctggggcgtcggcgtagaggggcctggagagggtcgcaaagagaaggagcgaggcggtcgccgttcccagagggacgagtagtcgagcacgaggcgggagcggaaggcgaggcataggcagaggggaggaggagggtgagaggtcgggatgacggagcaggaggatcaagggccgcgcgtgtccgtgccggcgggggctgaacctggcgcggtattccagaccaggcttaaggtgtcggtcggtacaggcagcgcactgatcggcgacagctcggagggatgtgcgcgaggctgcgtggtcagagtgcgagctgagactatttttcggttctgaaaagcaaaggcgggcatgatagatgagggcaagcggagaagggcccggccgagcgaccggcgcaaggtgattacgggttagggatgcagtagtagatagaggagaagaggtggggaagacagggcccgcgctggaaaacggccgctcactggaggcgggtcgtgaggaggaggtcgccctggttgtccataccgagggtcgccttgaagaactgctcgagcgcctggcgctggcggctgagcgagttgacgacgccggtgccctccttgacgagcggggccttcagggagtacgagaggagcgacaggaccgagtagagcttttcgaacggcacggtctcgtcggcggccgcgaacgactcagccgagggcgagggccggtactgtgagcgagggaagagcgaggggtcagccagagaccgagagagagagaagggcgtgcggcgcacctggatccgggtcatgacctcggcgaggatcgtgaggtcgaggatgaggggcgtggcgagcagcgagtcctcacactcgttgaagctggcgggagaacagggtgagcgtgggcccaatccaacgaaccagtggaagcgagcgagctacgtacatgttcatcgtgttccggccaccgcagaagagctccgagacgtagctgtcgatggcgaccttggagtcgccgaccgtcgggacatacttgatgacgacgaggtggtccgggtgctcgcccttctgcttgctaccctcgggcgcgcgcttatagaggagctcgttcgactccaccatgtcgtcgatgaccgacgacttggagatctccttcgaccggaactgctcggcggccgagaggttctggccgtcattgttctgcgagaagaagaggcagtcagttgggagagttgcgtcacaaaaagaggggcaacgagggcgcacgccgaggtggttgtacgacgagatggcgagcggcttgatgccggcgttgacgaggaactcggcaaggacgctcttgaccttggtctggcccgacttgaggtcgtcgccggcgataaaggcgcccttctcctcggcgaggcggatcgcgccggggacaaacgtgttctggggcgcgccgttgatgaagggcgcgttctcgaggatggcagcaacggcaaagagcgttgagggcgagacctcgtcgtgcgacgaggcgatcgaggcgaggagcgcctcggccgagtcgttgacgtcggggatgatggccgagtagcgctcggtgttggccgtccagaagacgacgacggtcgataggtcgttggcagcctgagggcagcgagcgagcagagggtcagcggagtccctcagcgtgggaggaggcagcagcgggaaggacgcaccttgaagtcgcggatgtccttgcggatctgctcgaggtgggcctgcttgtcgttgccgggcaggacattgtcggcccgctcgccctggttggcggcgatgaagtccgggtagtagaccgacggcaggggcttgatgtcctccatcaggggcgcgacctgccgctgaaggtcgtagggcaggaccttggcccgcgtcatggcgcccgcgagcgggaggccggaaatgtcccagccgccgaggacgaggtcgttcgggtgaaccatcgggagcatgtcggctgagaggaaagaggggtcaacaggtcagcgacagattgcgagagggacaaggacggcgaggagagagaacgcacagagcgggatgttgacgtccttgccggcgccgtcagagccaaggcggatggtcgaggcccggacgagctggcgacgggtgatagagaattgtcagtcgggcgcatacatggcaggtctcatggcgggcaacgcaccgagccaatgtagttgggccgctcgacgccgttcttggtgtgccactcgatgccgtgctggttggcgagctgggtggcgacgagggtcgaaccgttgttgccgcccatgccgacgagcatgagactgtcgaagggcgagggggtcagctagagtcacgctgcgttatggatgggagagcggacgcacccagtcttggggacgacgcgctgcgtcttgaactcgtaagccgtctcggtccgctggaccttgatcttgccctggtcgagctcgaccttagcgccacggtcgacgaaacgggcccggatctcgctctcggtgtagcgcgtgttgcccttgccgaggtcgacctcaattccgccggggaaggccgagcgggccgccgtcgggtgcggggcggcgcggctggagctcgcgcccaggggcgaggacgagagggcgggcgagttggggaacgagaggtcggagccgttgacgtggtctggagtgttcatcctgcgaaaagagatggcgggcgtcagcgacctgaagtacgggcaagggaaggaaaggagggcgggcgaggaaggacgcacgtgaaggaagagtggctgagcgaaagcgggagaaaaaagaaaacaagaggagagggattgggtcagtcacgaaccgccaagagaaagggggaaggcagggcgagcgacggcagggcagcgcgagcgtgcaggctcgccgtcgtgaaagcgaggcgcagctgcgtgctgatgcagacgcgtgcccgcgcgcaaggaaggatggcgacactcacgcgttcgtgaaaggcgttgggggaagcgggaggtgcgctgaagacgggaaggaggcagtaggttgatggcgaggagcgaggacgtgagcaggaggagaggtcgtcagtgctctgctgtagctgctcctgctggcgagagcggtagtctcgcactgatttggtggtcggcgggcggggtggtgggtgagcgagaaagagggaaggaagcaggcccgcctcttttcacgctcgagctcgccatcccccccagcgatgcacagccgtgccggccgccggccgggcgggtgagctggcctgccaccgcgccggcttgtcggtcaggcggcccgttcaagccgaagccaccattcattcgcacgggttgctgggggagagaggttgagtgggttctacggccgcccctgagcccccattgcgttcaaaaaaacggcggcggtgaagggaaggtcagcaggcggtcgctgacggtttttgggagactgggcatggtgagtggcagtttggaggagttgaaggtcgcttcctgcctgaaggggtccgtcccgcggacaatgcggcggaagcgatcgtttggagccccgccttggctcttactcttcctccttctctcttccctctgcttcccttcccccttctcaccttgtctttaaacagcgaagaacgcagcgtactgacattgagaagcttgctggctggcctgtctgctcgatgaatatattgcaggctagccctatcgcatcccaccctccgtttgctcatttttgtccataatctcttgcgaggcggaccctttccccttgtccaacctctgcagttcacttcatccgcagatcaacatcggcccgactatgaggaaagagtacgggcaggtttggaagggttgtagaggcgaggctcttgtcggccgaagtgttgctgcgcgcgaggctcgaagggaagacggctttcggctggccctttcgaacatcctatctctgccctctcccagctctcccttactctccgactctgaccttttcccccagcagccgcttccgctcagccgcggcgcctcttggccctcgacggcgcctccatgagccattccgacctcctaccaccgcctttgatcaccgagcgcgagcagtcgtcagcccgccccttcccgaccgagctcgacatgctcctcctctcgaccgacgaggcgccggacgaggggctcatccgccgccggcactcaaggcagaagcttgcgttcttctcgtacgcatttgccgctgaatgctttgcctcggccgggatggtcagtcggccgctcttccgtgccttccgagatgccgacagtctgacctcctctttcgcctccgcagtcggccttcatcccgctctcgctcgaggcgacagcccgtgcccagggcttcagcgatccagcccacacaatcccatgcggctcatcaagcggagctgccgacggcttgccatgcaaagctaggctgctgggcgtctggatcgactcgtcgagcttcgcgtgcgtagcgaggctcagctgcggcactcgaatgccggctgaccctggccctgcgcagcctcttcaccttttcggtcgccgtcctcgtccaggccatctcagtcatctcgctctcgacgatcgccgaccatccaccgcagcgcaaggcgctcctgctcggcttcgccggcgtcggctcgctcgctgccttgctctacccgggcgtcagctcagcctcgggcctcgcgctgcttgcgatcatcggcatcacctcgttcggcgtctcattcgtctgcctcaactcgtttctgcccgagctcggccgaggcggcgtcgaggttcgagctgctcagcaacggctcgaggaggaggtcgatcggctgaaagccgagcgcgagcaagccggcggcggcagctcacgagcggacgagcgaccaggcctcatgctgcctggcgtcgagtttgctgctggtcagtggggcgacgacgacgagcgcgagggcgcgccactccttgaggacgaggttttgacaggtcagatccaggacgagcggctcgccggcctccagcaggcgctggccgccgcccgatcggcctacaccgcgaccgtctcgctctttggcatcgccatcggctacggcggcgggacgcttctctacatcccggcctactttctcgtctcggcgttcaagggctcaaccttctcgctccggctcaacgtcggcctctcgggtgcgatgtggctggtcgcgacgacgccggctctgctctggctcgggagcgctaagtcgaccggcaatcggacggcccggctcggctggcggcatgaggttgcacggagctggcgcaatctcggtcggatggttcgaccaagcgagatccggcggctcgccaacctcttctacttcttgttggcctggttctttctaagcgatggtgagaccgccggctgccgtgccagtctcaggccacgattgaccgtcgctcctctctccagcctgcgcaacgttcacaagcacctcgatcatcttcgccaagacggagctcggaatgaagtcgacgcaagtcacgatcgtcgccttcgtcgcccaggcgacaggcgtcctcggtggattcgctgcgccgagcctccagcgccgcctgcgactctccaacaaggcctcgatggcgcttctcgttggcggcctcgcggtcatctgcctctacggctgcctcggcctcatcggcggcgagaacggcttcggcggcctgcggaccgccaacgagatgtatgccgtcgccggcctctttggcctgacgttcgggccattccaggcctacgctcggtcggtctttgccgagctcatcccgcccggtcaagaagcgcgctggttcggcctctacagcatcaccgacaagtcgagcagcttcttcggcccattcgttgtcgggctgatcgctgaccggaccggccagatccgatacggcttcgtctttctctttacgatactcgccctaccgctgcctctgctctggtggcgggtcgacgtccacgaagggcacgagcaggcccgtgtctacgccgaagaggaaacccgtgctgtttccgaataggcctttgtccccttccagcttgttgcaccgctcatcggacaagatcgtatggcaactctgtggtagcctcggacccaggcctttttgtagactgatggcgaaggcacgccggccagtcaatggcatcggtgcctggcggagcgcgtgcgtgcgcaaaaggggctgctgaaacgctttgtcgcgccggcctctgcgccgcatctcctgtcgccctcgccttcgccctcgacctcgccctcttccctcacctccgcccagctcgcctattagctctctctaccaactcctccgtcgccccgccgctccgatgtcggacgagcgtccgagctcctcctcgccgctgagcgggggcgtcgtccagaacccgctgccgagccgcttcagcagcacgacgatcggctcgtctggcgatgggccgtcgacctcgagcaaagcctcgcagccgctcgcctgggcaggccccggcggtcggcggccgtcggcctcgctctcccgccgcgctagtattgcctcgtcttcgacgccgtcgcatctcccctcggtcgctgaggacggcgacgcgcttggagcctcgcccccgccaccgagcttcccccacccactccggcctgccgctcggcctggaccgttcggccacccgccgcaggagctcaccctcgtcgaggctgctctcggcggcgacgtcgagtcggctcgggcagcgctcgcgcggggcgagacgccgggcaagcgagatgcccagggccgagacgccttgctcgccaccatcgccggctgggccgtcctccggttcgtccgcctccgttgcaccatgcagacacttggcgtcccgcctattgactactatgaaactcctggtctcgtaggcacttcaacccaggcaccgtcgtccgaatgactgcgcacgagccgcccgacccctttggcctctttcttgagcttcttcccgacccgtccgtcacgctctggacgctcaacgcgtcttacccggtcgtccagactggcacgctccttacggtcgcctcgtggctcgagaagatcgactttgtgcggatgctgctcggcgaatcgcgcgatgacacccagacgaccttttctggcctccgcggctgggtagatcccgacggatcggacgctcggggcgggacgggcctgatgtacgccgccgtctcgggacacattgagattgcgcagcttctggtcagtcgtcaatcgaccacctctccctcgaagggccgagtcgagctgatccttgcgcgtcttctctgcgacagctgagtaacggagcccggcctgatcgaacggagaacggcgggctgtcggccatctggcatgcgaccggccggcctcagatgacctggctgcttgaggacgcgctccgcaagacgcgagcgaaggagcacaaggtgagccgcagtcatctagtccgtcgccgattgcgctccaactgaccgttcgtctttcttgccgcaggaccttgcgccttgcttcagctcagtgacacgactcgtctcgctcgacccagagctttactattctgcacctctttcggtcgacccgccgccggtcgccttcttcgagtccgcgaagcacgcgagccacggcaagagcctcctccgcgcagtcaagtcctccgacgtcaccgccctcgaaggcctcctcttcccgctcgcacctttcgccacgtccgaggcttcgactgcgctgtcgaccgtcactcagcgccatggcgtcgtcggcctcgttaactttgtcgacgagaatgggctatcgcccctgcaccatgccgtccgggtccagccggcgcctgatctacaagtcttcaagctgctctttgccgccggcgccgatctcaacctcgcctgtgtctctcggtcgacgccgctccaccatctcgcctgcctcggcggctctgaccgagagctcacccgccggaactttctcatccggcagaagcttgagcagacgcaatcgaccccttcagcagactctgagcgcctgcggacgatccaaaacaccgtcaccacggccgggctgccgttgtctggcggagagaccgaagccccaagcgagattggcaatctgcccgaggtcaagatcgacgacaaggagaccttcgtgctcgctaacagcgagacggagcatcacctgaaggaggcggtcactctgcttttgcggctaggctcctgtcccgacatcgcagactgtgccggagcactaccgctccactttgctgccgaggtgcgtttcactacaatctgataggaggaccactgactgactcatctgaagtcccgcatcagttcggctcctcgcgtgagattgtgcgggcgctgctggccagcgacctcgaacaagaggagcgctcgctgcgtgcgcggctggagctgcctcaggagacgcccgagcggatcccggcccgccttcgccagaatgggctcggtgcgtctatccagcttcctcgtcaagagtcctcgctgacggtcctccctatatcgctgcaggcctcacgcctcgcgacctctgtcgggtcgagttcatcgacctcttcgaaatggccggcgaggaggcaaaggcgcggcgcaaagtgctcatcgaggagcatgcagcgacgacggacgtcctacctctagaggttgccgatagcgccctgtcaagcggcccatcatcgtctcatgcctcgtcgaccgcctcgctcccgaagcttcagacgcgcgactcgatcctccagccgctgccgctcatcacttcgctcgaggaggccgggccgacggtcgagcagatttgcgacaacctgcttcacgtcgaccggtctctcgtgcgtcacgctcctctctcagtcgtcaagagcaagtgctgacgagcactcggccatcggcagtcgtctggcctgcttctccgggccaaggaggacctcgcccggcagaatgcgatccaccctgagttggaccactttctctatccgccgcaggccgatccgatcgcagaaggcatcacccggctgcggcactcgctctccgtcagcgtacgcaacttggacaaccggttccggcccgtctcactcgagagcacgcagtcgtcctggtggagtcagccgagcagctgctactcccagaacgagatctgcacgatccgctccgagctcgactcgctctaccggtgagagctctctggcgtccgtcagtgttcgaacttccttggctgatgcgtctgtcattgcacctttatctcaggctcttcaccaacaccgctcacatggtcgcccgagtgctccagttctactcggatgcgatgcagcaagaggagatcaagctggccgcgatcgagcggcacggagaccggttccgcgagtcgctggccgagacgaccgatctggtcgaccggctgagccggcagaaggagcggctctgggccaagatggaggaggccgagacggataggcacaatcggcgcatcctcgctcgcgtgaccgatctcgccgccgccattgttcttgccgtatcggaggacgtccaggtcgcagtccagcgaggctctgaggacctcgatctcgtccggcacatccgggcagcggcggccgaggccgtcaaggagctcgagaagatgcaggccgacattgctgacgtcgactgcagtgtcgctgctgaggccacggcaatagtcgacgagcacatcggccaggtcagcgcactgtcggcagacctcgtccggtcagccgttctgccggccaagccgccggctgacaagcgccagtcgtacgagccatcgtcgcaggtcgccagcgcggttccgcgctcgccctcttggtcatcgtcgttccccgtcacgccgacgtcgagctccttcacgtcgccatcagcgtcgagggtccggctgcccgacttcgcctcccctgcaacgaccgtctcgtgtggcttgggtcaggagaccgacgagtgcatttcagccttggcgggcggtcaactgtcgaccatgctaccgaactggatcgtcgaggcccagcctttgaaggagagcttcgaggaattcgtcgccgctcgcgccaatattgacgagatcgatcgcgacctgcgcgacatcgcggacgaactcgaccaggctgagcgtgagcctcgaaattcgcctttgcctcaaaagcaccgaggcttgtctgctgatgctgtctaactgccactgtctctggcagaggacgaggccctgatccaggcgttcattgaccagcttcccaagaaggcggctcacccggacgaggccgacgagcggcgcgaggccttccggctcatgacggtcgtctatgcccgagtcgagctgcttcgcaggcgccgtactgagctcgtcaaggagcaagagtcaacgatggccgtcctcgggcgctttcaggaggacgagcgtcagcaagaccgcacctcgaagctttcgtcgctcctgcggtcgcacctgtaccccgcggccggtgagcagtcgcaaacgacgcgcgtcaacgagtacgagccagccggagcgctcatcaccgacgaggtgacggcctggttgccctcgatgccctcggctccgcgccgggatgtaacgcacccgggtgaggccaatgtagcctgggacctccgcaaggttgcgctccgtgtcgaaggagccgacagcctcctcgctagagtctctgacgatctccgtctagtgcgccagacgatggaccaggtacgcgagcgtcgtccggcaaaaacctgccgcctcgctgacagagaaccccttcacagaaccgctctcgttgcgcccgggccgaaaagcacttggctgacgctcacacccagctggcgagttacctacaggtgcgtcgcggcgagctccttcgcgtcccctcgcagccgctgatcgaaggcttcgctcttgcgcccggtagtggcgcatggactcgctggtcgtgctctgggagtggctctcctccgaatcttccgacgagcggtcgtcgatctcgggagcctcctcttggatcctcgacgctcgcgaccggctcgtcttgcccgatcttatccgcgacccgctgccgctgcagccagacgcagcacagcgtccgccgtcagtcaagggcgtcgctggcacggcgtcgcttgccgcaactggtggaggagcaaccgatctcgcggcgatacagcacatgcttcgtcgccacgtacacgagccgctcgcgcaggcgcgggccgacgtcgcgcgcgcctcggattggagcaggatcctcagccagacgaaggcccggctcgacgctcggctgcttggcgactgacaccgcaggacgagaaggaatggcaggactcgcacgccctggtcagacggtagcatggacgcttgatgacggctcgaggcggagaagcaaagaggtggcatcgcatctaggcagcggtcccgctaaaagtagagactggcagcaaagacaatgtcgcgcttaatgagcgtttgggcctgctccatcttggccatcagctcgccgtcgccgatgacacgggccgagtcgcggacctcgtggcaagcctggtcgagccgggtgatgacgcggacgatggtgccctcggcaacgtccgtcagctcggtaatctgctcaaagggctgcgaacgggcaaggtacggggcccatcaatacgcgatgaccgagagcagaacggaagggtggcgacgtaccatgcccttggcccactcgtagacggcctcgacgaggccaaacttcagcgtcgccgcgtagtcctcgtgcgggaccttgtgccggtcctggacgcggccgagcttttctgcaatgtcgaggatgatctccttgcccctggtgagctgctcggggatgacgggctcgccgtccgatttctcgtgaaagacaaagcacgagagcagcgcgacaatctcctcgggcgcaaaggtcgcaagcgtgttctcgagaatgagttcggtcaggatgagctcgttggcagagttgatctgggcgggccggtggggagtgtcagcagaggcgactcgactggctgagagtccgagacaaaggtcgcacctcgcacgcaacacggcccttaagcaggacggtcgagttgtcgtcgatgaagcggagctccttgagtacctcgatccgagactcgtagtcgggcaagagctcgaggttctggtccgagatggccgccttgaggtcgttcatgcgccgctggagctccttctcctcgtgaatggcagagtactgcagaaagaaaggagaacgaggttaggcgccgggcaggcatcgatgaccagcagcacgggactgacgtgggccttaaagtcggcatcaaagtcgatcttgcgcttgcgctgctgcttgacgaggccggcccgcgctttaagcgcgtcctggaactcaagcttgcgcgacttgctccagtcgacctcgggaaaggacccagcctcctgaaactcggctgcgatgtcgacgagcgcgttcagcgtctcgttgatggccgacttgcgggccttgtcggcgatggccctgatcgcgtcggcatcgagctgagcggggtgggacgaggtcagcgaaagccggcggcagatcggagcagacagcacctcgactgaccttgtgctggcgagtggtgacgagcgagatgctcgtagcaggcaccatccgtacgtcataggcagggttggcgggtagcttgagcagctccgtcgtcggcggccagatcggaggcggcggcggcagttgcaaggcgtctgcagcaaagctgggggtatcagagcctgtcgtgagagagatggacagggcggccggccgttgacgtaccttgagcgtcggcagcggcagcctcctcggcatcgacgagggtaagcacgatgaacgatttgcccgaggcgtccgaagcggccgccatcgtcgtcaccggtcgaatgatgatagcaacattcgtctcgtagcgcgcatcgcgcaagataacaacacggccggctgcgatgtgttttgagccctgactggcggcgaggacgctgccgagcatccagttgttgaggtgcacgagctcggccgcgacctcgtagtagtggccgagggcgtccgttacgttcgggtttgttgatttgggcaggctctgaatgaggcgctcaagctgagggacggggtggatggccgagtcagcgaggtcgttcttgtttttcaagacggtgtcaccgcgcgtacctcgaggacccgctcctgctgctcgggcagaagcgtctgcgacgcattctccgagaaggaacgcttaatcatctcctccacccggagtgcctcaacccggagcaggttgaggatcatgtctgcagagccaccggcgacaatgtcagttgaccaacgcaagggttgtcgagaggcatgggtggtgacgtactgtaggtgagccggaactgcgacgacagcttggtcggctgaccgagcatcatctggttaaggaccgtcgtctgcgtgtggtagcaaggtcagggcgaggcgtcagcgatggcggagggatgccggcagtcaagcgggcaacacacacctcgggcacctcgtccttgtcgcacacgatgatgacgacgccggtcgcgtccaggccgcgccggcctgcgcggcccgacatctgtgtgtactcgcccggcaagagctcgcggaagcccttgccgtcgtgcttgcgaattccggagaagacgaccgagcgagcgggcatgttgacgccctggatgaagggaggtaatcagcctctggcggtcagggacggcgaggcagtggggcggacggaccatggcaaaggtctcggtcgcaaagagcaccttgacgtagccctgcgcaaagaggatctcgacaacctctgcgatgagggtacaattgtcagccggccggtcagcaaacaggaggggtatctacttgcgacacacccttgacgatcggcaggagacctccgtgatgaatgccgatgcctcggctgaggaggtcgcgcatgcgctgtatttgcggcagccgcttgtccgatcctggcaggatgcaggggcgtaggatcagactgatagtccaagcgcggcaggggttccagctctccaggccaggactaaccgttcagccgcttgagcgcgcgctcgatggtgacgtgaaccgcgctcttctccttggctgtgcaaaggtcggtgttgccgagcgagctggcattctcctcgcagcgcttcttcgaaaagatgaagcaaacgacgggcaggagcttctgcttctggaggtaagcgacgaggtgcgtccagaggttcttgtccggggcgtgaccgcggaagggaggagcgccaccaccgccaccgccccggccgcggacgactgcgcctcccctcggcggcccgccgccgcgccctccggccccaccgcgtgacagagggccaccgcgaccgttcgcgccgccccgagcacctccacgcccgcccgtccgctggagcggcgcgagaccggcggcctcgcgctccttgtcctgtttgcgacggagcgcatcgccggctgacttgaggccgtcgccgaggaacttgccggtcgagtcgagaatcttgtggaggtccttgccggcccagaggaagtgctcgagcgggaccggccgcttcggggtcgagatgacgtaaatgtccttcttcttcgtccgtctgcggtcaaaaaaaggcgtagcttgatcaacaactgctttagaggggggcagcgacgatcggcggcaaacgcacccgacccagccggcaaactcctttgtgttgggcacggtcgccgagaggaggatgatgttgacgtgctcgggcaggaggataatgacctcctcccagacgacgccgcgttcggcgtcgttgacataatgaacctcgtcaaagatgacgaattcgacgtcgcgtatcaggtcggcgcccttgtagagcatactacgcaggatctcggtcgtcatctgcggcgggagggctgtcggtcaggaaggagggctcttgcgagcgaagtacaacagggcacgcacaatcaggcaggcgccctctgggttgatctggacgtcgcccgtcaagatgccgatcgtcgacgggtcgaaagtctgcttgaagtcgcggaacttctggtttgagagggccttgatcggactcgtgtaaatggcgcgcgtcatgtgccgggcggcgagcgcgatggcgtactcggcaacgaccgtcttgccagccgacgtgtgggcggcgacaaagaccgagtcgcccatctctgcaaagacgaaggtgggaaaccaggtcagccgccggtggcgatcctccgcccgtcagcagctcggccaaagcgacgtaccgagatgatagatcgcctccttctggaagttgtcgagctcgaacggatacttgaacgccatgtcgggaacgagctcgtcaaagttcatcaggttctgcttgacgtcgacgacgtgcgcccactccttcttctcgagcgccttgcgccgccgcttggccttcttggcggctgggtctgcgagagagagcgactgtgacgtgcaaaagagtcggtcgggcgggtcagcatcggagaatgcagctgagaggtcgagttaggcgcacggcaaaggagagcggcaagaggtcgtcgaggccgctgaccggcaactgatcgctcgctgcgttcttcgcagccagcgcccgacgctcctcttccgacttgagcaggaactcgaccttctcgcggacgtcaccctcgccgccgttggtctcgcccttcacggccatggacgcagcagccgccgtcgccggccggcggataccctcgttcgatgcccggccgaggaaggtggcgataatagcctcctcctcctcgcgggcttcgcgctcctgctcgccctgggggctgaagtctgcctcggcagctcggcgggcagccttgagcgggccagtcggccctcgcttgaagccgggcggccgtgtccgccagccctcctcctcctcatcgtcctcgtcggcctcatcgagctcgtcggcgacgccaggcgagatgacggccccatcaagcccgccaggaaggaagggcatgttggcgctccgaccgcggacgaatgactggcctgagccaggcgcacgggaggtcgacaaagaggagatcgccgacggcggcggcggaggagccttggtctgtcggcgaatgaggggtggaagtcgcagggtcagctctggtgtcgccctgtacaaatgacagctcggccgcaaactaaggcaggacgcacctcgatccagccctctacgaggccgtcgagcccatggcgtttgaagctggcggcgtgagtcggagctccaggctcgagcgcgaacttcgggatgggcggcgggtcatcccaatgcctttcgaaggggccgagcgaaggcagcagaaaggcgagagagagcgtgaaggggtcagtcacacgctcctggaggttgccctgaagctctcgagctgtcgggcgtcgctgcacgtcgcgggcgatgcccgagcccggccagcgagacgcacagggcaaacgagtcaagccagctcggatcgctgaggtgcctcggcggagtgagaaagtcacgccggatacggtcggccgcctgctgcttggtcgggagggctccgaggtcgagctcctggaggatctcgtcgagggagggcggcgctggtcggagggcgagcggtgccgtcatcggagggacgagccggcgaggggagggctgaggcggcgggcgcctcttcgaggaagggacgaaaggagcgagcaaagggcggccgctccgaatgaaagctctcgcagctgatgctcgacgaaggatcaggtgggttgtggtagagggaggaaatggctcggcgagagcaggctaccaggcggaaacgagggctcgatcgcgggcgcccgccgaggcaacgtccggccactcgtacgcatgacggcgtccacttgtcaggtccccttttctcgcgcaggacaacgctgtcgctgcagccgaagctgcagatattgtcaagggttgcatgtgatgtctgcgaggggaggcttcggtccttcctccctcactccggccctccctcccctcccttccccctcccccttgttcaaacagcaagagcggcctcgtcctaacgatgggctccttctcggctctcgtcccctcggcgatgcttgccacctacaccggctccaaggccttccttgagcgctggacgcaggccctcggcgaggaggtcgaagagtttggcgtcgacgtccggctcgtcctgccttactttgttgtgcgtcgttcctccgcctcgcctcgctcaaatcacacacggcgctaactcgcctgcctctacgcttgccaggtctcctcgatggccaagatccgtcggccgtcgctcatggtgccaacgccctcggcgcttgtcaagtcgaccctctcgtcgctcctcctcgcccgaggcgccgccgcccggccgttcacctcgaccccgtactggtcgcacgccctctttgactggttcatggcccgagccgggctcggcggcaagtttgcgatggccaagggcctcgccatgcacaaggacatccgccggcgggcactcaagaagcgcgagcggcttgccaagcagcagtaaaagcctagcagcggatgctttggctcgggacgctgtcaggtcggaggagaacggaggcgagcgtggcctctggccgacgggtgctttctgatgaagtttcgacttatgaccagtatgctgcgtcgttgagtgcagagcccgtccgccctgcagagttcctcgagatgtctcctcgacctcaccgcgcgacatataaagcgaactgacctcgctgtcttgtcgagggcgacgtaaaggcgggacagacagtatcactgagcggtgggcgttgagagcgctttctgctcgcgccggcgaactgtgctcggagaagagcggctggctgctgcgcgcttttttcctcgagagaagacggcccgcctgtttttgagctgttgcttgttttgctctgcccgttgaccgtcagctatcaccctctgcaagaaatgaagccagacttccagctgcctcgcattcgctgtgctcacgctgcaaatgcgctgatccgagccgtctgcgaggtcgttgcacgctgactcgccgcctgcacggcaggcacacacctcccttcgcatcgcccaacttgcaagaccggctcacaggtcgcagctctcttgctaacgagttgacagctttcagaccaggtccacgttgctcggcaaaacgggcggtcagagatggaatcgacgcgacccgtgcgaaggcacgcccccgcagtcgcgtcgtcgcgtcgtcgacgcgcgtcttggcggcggcgatgcgtcggcggtcgctctacatcaaaactcgctggccacgcactcatttcgagctcatgctcagacatgttcgagctcatgctcagacatgttcgagcgagtgaagctggcacgcaccgcccaccgaacgctcggacgctagcctgctagcctcgcccccctcacgcccgacccgccactttcttccggtcgcccacaacttgggctcaatcgccccaacccgcataccgggttcgtaggcggagcgacgcggctggctttcaagtagcgcttcccgcccgcccttttggctctcctccaaccatcactcaacatccacccagcatcgccctcgcccagccttaccagcaactccagccaaccctacccgaaccatccaccctcaaccatcacaatcatgtgcgccatcatcaccaccctcaccgagaccggcttctgtccgctcctcgacgcagcctcgtcgaactgtgcgtccgcccttcccgctcctcccccttcctcttcctcgcccatctatcccttcaatgacaagcactgacatccgcctcgccgcgcatccgcatccatccgccctctccacttgcaggcgagtgcctccctcggcctgcacctggtacttctgccgctctgccctcctgcctcccgctctgccgagctacccgctttctccgcccatcattcaacactcccactgacccatccatccacccctccgctcgccacaagtcgtcctcacaatcatcatcagccgccacgagcccgagtcggccctcagcgagcacgcgcacctggacgatgacgctctccggttgcggtcgctggagtcaagcttcgagccgtttgccccggccaaggcgttcaagctcctcgaggtcccctccttcgagccatacggtgccactgttaagtacgacccgcccgccgatgctgccgccctcgaagacggctcggtcgacgatgggctcgacgccgatgtctttgcttccgacgacctcgaactctactttactcagccatcgctcggtgccggcttcgagtcggacgacgaagaagacgccgacttcgacctcctcaatagctcgccaagccgcggcgctgccatcgtccgcccgtcactcggcgccgccttcgagtcggacgatgaagacgacgacttcaacctctctggcgacgtgccctggtcgaaagcgaccggtaaggagcctgtcgtcatcctcaccccggccgaggtcctcgaggccaagcagcaagccggcctcgtccccgtccggggcccactcgtgcccgtcccggtcaagcggaagcggccgtcgatgaccgcgctcgtcggcgctgtcctcgccacactcgaggaggaggaggaggaggctgaggacaagctcgcggccctggccgaactagtcaacaagttcggtgacggcgactttaaagaagagtcggctgcctacgaccggacgccgaaggaggacgaagacgcgtacgactggacgctaaaggacgacgacctggaggtcgagcagcgcgccacttgggtgcccatcgcctttattcgaaagcctcgaatggcgcgcctcgctaacaatcggccgtcgacactcgctttgcgaacactcatgctcgagaacgtcgaggaggggggggatgagcctgaagacaaggagccgtgcgtcaccgacggcggctcggatgactcgaacgaggtcgtcgctgtcgagagcgcgctgcccgacatgaacgcacctatcgagtcgaagttcaagacggccctcagctgtgcgccggtcaactatcaggatggcaagaaggccgagccgagcacaacgccggtcgccggccgctcgctcaagtgcaaggtcaaggtgcgtcgcaatctctttttcttctctacttcgacttcattgctaaccttcgcctccccctccgacctaggccttcatccagcgcatttccacccgggagtcgcgttcgcagccgccgacctccgctctcagcaaatcggtctttctcaatgaccccgacgacgaggacgaggactcggtcgaatgcctcggccgctggtgcgctgctgcggtagccgacgacgactcgaccttgaccaccctcgccagtctgtcgtcgacgccctcgttccggtcgttcagcagcagttcggcggcgtcaacggccagcaataacagcgacgaccgggcgctctgcacccctccgccgtcgaacgagctcgagtctcaccgcctgcgcctattctccgtcgactcgtgagtactccctttctggttgacaatccttcttatcttgcgcaaccgctgaccaccgcttcatccttccgcttcctcagtgcctcgcggtcgagtttcgccctcaactcggaaggcctcgtcttctcggacgtgtcgctcaaccgcccaactcgtccctcgtcgatgatctggcgcaagaaccgttcgccctcggccttctttgcccggctcggctctatcatgacgtcgtgcgcttagacttcaccatctcctgctgctttctccatctcgacgggatcccgaagcttgcacacatcttgcagcctctcagagcgacgctgcaccttccttcctctgctttttcccttactctctgctcctgctcataccttgtactctctcgtctctgactgtatgatctcttctcctcttgggcaccctgtacgtgcgggccgagacccagctttcgttctctctcgccggcgtcgaggctgctcgattcgaaggcgtgcattgatcggagatcgaccgcagtcgagcgtcgccctcagcggaggctggctctctgatgtagatctgcccgacgcgacaggtcgaccagcgcgaaggatcggcttcgggttgcgcgttggcgctggcgtcttagctattgagcgctgcgtcggcgggtgagtgcagagggtggggacttaaagcgtgagacgagacgcgaaaggttgtgtgcacgcccgaccgacactcagcggggcggatagagcttgctcgcagcagcgtaggcccgggccgagtcgtcgacggccagctcgtcctcgacgagcgcctcctggacgtttgcgagctggacgtggagtgcgcgaacggtctgcgcctcggccgagtgtcgggcgtgacctgaggcgccgagggaaggtgtcatcgacgtcaacgagcgtccttgacgggatgagaggggtcaacacacacgtcgccggccgagtcggtcctcccactggcgaatgtactcgcgatgggccttgatgagcgcccggcggttgtcgagcgaggcgtagcgggcggtcacgtcggcaaaccaagttgacctacgagagtcgtaggattcagcgctcatgctacggtcgattagatttgagaattcaacgcacaagatgcggtagcgcaggacgctgtactgatcatcgtcctcggtcgtcgcgccgacgccgatgcggtcgcaaacgaggagcgttctcaacctgccgagcggaaggccagggtcaggttcggacggctggccagatgagactcggacgcacgctcggttgcgctgagcgtcggtcgacagggtagagacgtcaaagccctcctgtacgtatgggtcgagacgttcgcggttagcggcgagcggcgggcagaaagcgacagataacgcagcgcaccatgagctcgtcgtaggccagccgcgcgtcttgcgcgagacgtgctgattgcgccgattggccgtgcttgacgagctcacgggcgagggccgaagcgagggtctcgagggcctgcatgagggaggacggtcaagggtgttggcacgaggaagggcggagttctgcggtggcgcgcgggcaagggaggaaagctgatgagcgtttcgcgctggctcgagcgcgggctaaggtgtcgaggatgaaggcgagagctgctcactaagatgcgcgatggtcgacgaggtggttgttgagggtagacggacgacggccgctctttcttgcaggtcgtcgtcgtcctccgccgctgctgcgccgccgcccggctgctgacagcggcgctgacgaggaggatggcccggatagccagccgggaagccccgcttccgcctgatccgcccgctcgtcgacccatcttggcacagtcgcttgcttcgctcgacgacaacaggaggcagagcaaagcggacaaccttggccgcttttgtcaatgtccgggggctctcggtcggatgtgaagtgcgatgcaaaaaaaggggctcgaagaggaatggcctgtcacctcgtcttcctgtcagcctgcgtcgagcgcgagaggagagtcgtctcatcgagcagcagagcgactcagattatcggcctcgttgtcattgacgctcggcagagggaagaccctcggctcacgtggattgccccaggcctggcataccgccgtcgaccaagacgcctccgtgtgtgcgcccggacggaacgagggctgctaccacttgtcgacggcgaccagcacggttgcgacgccgagcgctctctcgctcgctcgcccgcgcacactggggcgaacatagcaaggaaggaggaaagcggtcgtcaagtaaaggctgggaagcggcgtgccctcttggccgcccgagcccgacgcttcctcccggccttccctcccgccgactgatccgacctgcccccggtctggctcaggttccgactcgcacgagcgtcgaagatgaatgaggaagggatcgtcaaataagaagaggcggggtcgttagaggaggacagaagagaggaggaaaggagagctaggagggctacataaaggcctaagagggtgcagaaaagctgcggcaagctgcctaaccgctgcacatggtgcaagcgtctttgttatcgatgctgcattgaagggcggcctcggcgcggtcggcagctcgcttctgggcctcctcgaatgtaatgtcatcgttgtcgtcgccgccgaccttgtcggacgacgcgggcgaggcaggctgggccggcaggacctcgtggccggtcgaggcggcgacggtcgcggccatggccgggacgagcgaggtctttgcgagtgagaccggggaggcggcggcagccttggtcggcgtgtcggcggtcgagttggttgactcggggacgaaaaccgacggcggcggcgtcgagatggccgaaggcgtgaacgtgagcttctggacgccattcgtgacggcggcgacaccgcctgcaggcgccgacttgaccggcgtctggagggcggcagggctggcggcggcggcgatggcgggcgaggccttgttggcggcagcgccccgggcggtcgcctcctttgcctccttgatctgctcggccgagagcgtgaactggatggcctgggcggccggccgggtccggaggtagtacatgcccgtcttgagtccctttcgccagccgtagaagtgcatcgaggtgagctggccgaacgtcgggttcgtcaggtggatgttgagcgactgcgactggtcgataaacgccccccggtcggcggcgaggtcgatgaccttcttctgcgaaatctcccagaccgtcttgtagatggccttgacgtcggctgggatggcgtcaatgttctggaccgagccgccgtgggcgatgatccggttcttcatgtcgtcgtcccaaaggccgagctcgacgagctccttgaggagccacgggcacaccacctggaactcgcccgcgagaacacggcgcgtgtagatgttcctgcgagacgggcgcgccgtgtgaggccagcgtcagcattggttaagcaggaagcagcagcagcggcggtgcaggtacgcacgaggtgtaaggctcaaagcactcgttgaagccgaggatctgcgacgtcgaagccgtcggcatcggtgcgagcaggagcgagtttcggatgccgtgctgggcgacctttgccttgagcgcgctccagtcccagagctcgctcgggctgacgccccacatgtcaaactggaagatgccctgcgaggccggcgagcccgggtacgtctcgtacgtgccctcgcgctcggcaatctcgcacgacgcctcgagcgcggcgtggtagatcgtctcaaagatctggatgttgagctgcttggcctcaggcccgtcaaacggcatccggaggatcatgaaggcgtcagccaggccctggacgccgagcccgatcggccggtgccgcatgtttgacttgcgggcctcgggcaccgggtagtagttgacgtcgatgatccggttcaggttaccggtgacaaccttgacgacgtcgtggagcttctggaagttgtagacgccgtcctggatgtaggtcgggagcgcgatcgaggcaaggttgcaaacggcgacctcgtccggcgcagagtactcgataatctcggtgcagaggttcgacgacttgatcgtcccgaggttcttctggttcgacttggcgttggccgcgtccttgtagcagatgaagggcgtgcccgtctcggtctggctctccatgatggcgtaccagagcttctgggcggggacgattcgcttaaacttgccagccttctcgtacgactcgaagagggcctcaaactcgtcgccgtagacgtcggccaggcccgggcactcgttcgggcacatgagcggccagtcgccgttggcctcgacgcgcttcataaagaggtcggggatccagagcgcgtagaagaggtcgcgcgcccggttctcctccttgccgtggttcttgcggaggtcgatgaagtcgaaaatgtcggcgtgccagggctcgagatagatgctgagcgagagggaaaggggtgttagtgtcagcctctctcgagccctcgatctcctgagccacatcaaagtggcggaacccacgcaaaggcgcctggccgcttgttgccgccctggtcgacgtagcgcgccgtcgcgtcgtaagcacgcagcatcggcacaatcccgttcgagaagccgttggtgccggcaatgtacgagccctttgcgcgaatgttgtggatgttgaggccgatgccgccggccgtctttgagatgagggcgcacgtcttgagcgtgtcgtagatgccctcgatcgagtcgtccgacatgctgacgaggaagcacgacgacagctgcgggtggggcgtgcccgcgttgaagagctgccgcgagaagaagaagggaggggcaattgtcagcttgcaccgcacaagggggggggacgaaatagcgcagtcggctcgggtggagggggaggggggtacgaactgtcggtgaggcgtgcgtgaagtagcgctccgacatcaggttgtacgtctcgatcgccttctcccagttcttgccgtgaatgccgacggcgacgcgcatcagcatgtgctgcggccgctcggcgacgcggccgtcgatccggaggaggtacgaccgctcgagcgtcttgaatccgaagctgcggggaggaggggggggagcaaaagccgaagggtctcagtcaatgaagggcccgcgggcaaagagggaccgatgtgctccaggaggaggaccggcaggcggaaacgcacaagttgtagtggaagtcgcggtcaaagatgatggccgagtcgagctgctccttgttctccatgatggcctcgtacgtctcctttgagatcatgggcgagagccggttgttctttgggttgacgtacgtgtagagatcgtggatgacgtgcgagaacgtcttcttggtctctttgtgaaggttggagactggcagtagcgaggggtgtgtgttagcgaggggcgacgatgggagaagaaggggggggaccgactagcaatccgggcggcgaggatcgcatagtccgggtgcttcgtcgtcaggtaggcggccgtctcggccgcgaggttctgtgaaaagaacgggacgagtcgagaggagaagggaaggtcagccaccggccggttggttcattcaacgcgcgacgcgtcggccaggcctcccgtcatcgaggcctgcctggctgacgagacgtctcgcccagcatctcgcacagaaaagggaagaagaggactgacgtcgagctcgaccgtcgtcacgccctggtgaacgcccatgcagaccttcttcgtgatcctgttcgaaggaagaagcacgtcggtcgacgagaggttggtcagcacgacgcgtccttgccctcgcgcgccgcggcgcgcctggcgagagcgggcaaagaaggagtgggacggactcgatcggctcgacaaagttcgagtcgaggccgtagcaaagcttggagacgcgagcggtgatcttgtcgaacctgcgagcagagagccacggaggcgggaggggtcagccagggaaaagggcgggagagcagcagggcgtgagcctgggctgaaaaatgtgatgtggaaagtgcaggaggagagaataggaaacgacggcgagagccttgagagagcgaaagatgggaaggtaaactcacgcgacgcgctctttgcggccatctcgcttgtagactgaagaaagagcagccagagtcgtcagccattttgcaggacggagggaggaggagggctcggaggggaggaggagagggcgacgcgacgcgacgcgctggagggcggggtggttgagtgacgtcgtgcccaagtctccaagggcggctgaatcgagagtgtgggcatagtggtgtgagcgaggagaagactggctctacttaccccacatgctgggctgtaataagaaaggaggaagggaggaaggaaggggttgacggtcggaatcgagagacgcgtccgcgccgggaaatgagcagcagcagcagcgcgcgccaaataaaaataaaggtgtcgcgctctgcgaccgatgactgagcacggcaagtcggccgacgacggtccgacctggcagggaggacgggtggacgctggaagaccctgacttcgtgacgttgcaagtagtgcgaggacgccctcgtcattcatcctccccgaccacgaccccaggctcgacccactcgacgccgtgcatcaccctcccagcctcgctatcccgcttgtccatcttgacgaccttcccgcctccaacgagcttcagccggtgacccttcccctccatcctcacccgccacgcccggttcgcgacgtcggggtgctcgccacgtttccgcgaagcgagcgggaggtaagatgggacggtctcgagcttaaaggtgtttgcgccgagcggggtcgagaaggtcgagagcttacgtttgccgggcggggagatgagtcgggcggggataggcgttgtgcccgcttctgggggaggagggtcggccgcggccgcggcgtgagggtggaggtggaggaaggacgagaggaagtgggcgtgcaggagcgtcgtcgtgtgcgaggcttcgaccgcttcggccatgagcgcgctcagggcgagtgcggtccggcgcgtgtcttcctggtggtgcgtccctccaccgccgcccgtggtgattggggccgggacgagcggctgaggcccgtactgccagtcgaggaggccgtccggaaagccgcagtcccagaggacaagcggctggtcgctcgccatctcgtacgcgggcttggtctcccagcgaaacatgtcgttgacgacctcgggcggctcgagcccggagccgacgaggaagaggacggccatgatgtgccggacttgatggtagaggaaggcctttccgagcaggtcaagcacgtaaaacgagcctgagctcggcgccggctctgggccgccggccggccgagagggctcgaggttagtcggcgagatgaacgagtagggcgagagctcgagcgggcccgagccgagggcgggaacggccgagattttagcagcgaggatctcgcgccggtgcgacgccagctgctttgagccgtcaaccttgcagaagtttcggaagtcgtgctcgccctccaggtaggccgccgctttccgcatcgcgccgaggtcgagcggccgggcgagagccgacgtaggcgagggcgaggatgcaagcgtgaaaaagtacttgtaatgtcggtgcgagcacgagtggcgggcgtcaaacgcgcccttgtgccaagcgggagggagcggggaccacgcgaggagccggatcgtcggggggaggagccgattcaggagcgagacgtatggaaattcgagcggctttgacttgggtttctgtgcgaaaggcgttgaggaagagaggctgccgaggtcggcggcgtcctcctctccgccgccaggcgtgcccggagccaacgacgtcgttggcgagcgtgagcgtgtgctgctgctgctcgacgtgccctccgcaggcgagtagaagccgaacgggtcgacctcggcctcgtcctcgggcctccggggcgcatggacctcgtcgtcaaacgcgacccgactcctcagccagaggttgacgacctggcccgcggcgctcacgcccctgtcggtcctcccgcagcgcgcaaagccagatgcctcccagccgcccgtgccaggctcgatcaggccggacttttcgagcgccgagagcaggacgccctcaacggtcgggaggggcgagtcgggctggatggcgagcccgcagaagggcgcgccgaggtacgagagcttgagggcgaccttgcggagcggcaggtgcgagaggtcgggcgcttgcttgcgctcgaccggagggagcgcgcggaccttgcggagcgtcagcttcttggcggcggccggcggcgagctgagcgggccgggtggtgccggcggtgacaaggcaattggcgctgctgctgctgacgacgacgacgctgccgacgagccgagctcaagcgcctcaagccgggcaatgagtgcctgcttggaccaggttgagtagtcggtcgggctcgcaacgggaggtagtgtggctgacgacatcctggcctggcagagggcgggctggagacgggcgaggcaacggagcatgagggtcgggaggaagggagggcgaggaggtcgaggggcgggaaaggggtcaaactagcggaatgcatcgaacctctactggatgcatcgtcgagcccgacaccgccccggcctctcctcctcgttgcatccatccaccttccctcatcgaccccgatagcaggcagcatggacatcaagccggcagccttcgacttcaacccgttcgcaccgccgacagcggccgactacgccgccgttcacgaccagcagcagcagcagcagcagctgtaccatcagcagttcgcggccggagacgacgccgacatggacggctatggctccggggcgttccatcttggccaccagcacgagcacgagcacgaggcgccagacgcgggagacgaaggggatagcaagcggcctcggctcaggctcggtacgtctcgtctctcgctcccgggcgtaaccgaaatcatccgtcggccgcttgctgctgctgttgctgacaccgccttcgtctcgtctcgcttcattcagcccgtgcctgcgatcgctgcaagtcagtcgcaccaacgacttgctccttttcgtctgcgccgctcatcgctgatcccgcgctcgtccctctgctcgctctccaccaggcggcgcaagatcaaggtgcgagccggagcccgtcgtcagccggggatcagcgccctcgctcgccgaccgctcccgcgctcgtgacacatgctgacgacctttcaccggctccttctctctctctcgcacagtgcgacaccaattcgccctgccagccttgcatcctcgccaagcagccttgtacgtcgtgcccctctctgcttcttcttgccgggctgcctgcacggcgctgcgcccccttcctcctgccgcgagccgcgcgtgcgcaggtagccgcccgggccttgcgagctggcacgtgagccatcgagcggctcatccgaatcctgactttctctttttctctccttcacttgtgccactcgcaaggcacgttcaatacgccgacgcgacggacgagcaagcctcgcgtcccgacgacgtcgtcctttggcagcacgtcggccgaggcgtcttcctcctcctcggccctccacccagctaacgtccacaaggcgcgcaagaacgtcaaggacctcgaggcgcggatggcctcgctcgaagcgcagctgcggcgctcgaccgaggtcccgcctcacgtccacaacgaggcgctctcgaagctggacaagtcgctgctgaacccgagcgtgccgagcgggaccgttacggctgctagagggggacggacgccggtcgtgggctcggtcgggctgccgagcacgtctgcctcgagctcaggctcgtcaacgacgatgctccacgtcccgtccgccggctcctacccggcctacgcatccggctcgggctccgcctcgtcgtcaaccctgctcccgacgctccccgccgaaagcactctcccaccgccgttcctcccaccggcagcgtcgacgtcgacggcggcggccagcgctggcagctggggccagtttgacttctcgctccggcccgatgcgcccatggcatccgcagcggcgaccgtcgctcctccgccggctcggatgtcgtcgagcagtcggccacctgctgccgctgccagcagcagcagcaacagcagcagcaacgctcacaagggcgacagtcttgagaagcagatggaggggatgaacctttcaccgggcttcatctaccttgacgagatgggcatgacgtgcgctcccccctccccccccggcccgctgttagaaattcgaggcgtggagactgacaactcttccctcgtccttttgcagaaaatggcagggcgcaacgtctggtttccccttgctcgagctgctcgcgtcggccgaacggcatccaccgacgccgaccgtcgagcgcaagtcggcgtttgccccgtcgagcgaggccgagtcgtcgccgctcgccgggggcgaactctcaggcgacagcgaggagcgcgggcgtagtcgctcgcgtggaagagcgcctggctcgaaagcggccggggctggcttggcgagccctggcctgggtggtggtgacggctcggcgacgtctgcttcgcgtcggcggagcagccattcgcattcttcgccgctcacagagggcacgcccggctcgtcctcgactggccagacgcctgcgctgccgccgccgacgacgacgaccgacgacgactttttccctggccgcaagagccgcgaggtcaagtcgctcaaccccgaggcgagctggaaggtcatcacgggcgtgattgagcccgacctgatggacacgctcatccggagctacctctcgacgacccacctcctctggccgttcctccacgtaccgtcgttcctggccgactatgcaaacccgaagcgctggggcgagccgggctttgcgcgcttcatcgtcgccgtctgcaccctctcttcacgccgtctgtcccccttgtctctctcgcgtctgtagttgcgccgacgctgaccctgcctccgctgttgctcccagacgtcgacgacccgcgggttcgggccgtccccggcgacccgtcctcggccggcaagagctacctggagctcttcaaaaagatgcaggacctcccctcggccgaccggccgacgctctactcgatgcaggccaattttctcgccgccatctactgcatgggcctcggcacgctctcaaaggccttccagctctttgccgaggccatcaccatgtcgatcgacggcggcctccaccgcgacgtcggcgagtacgacatcttttcgccgattgagcgcgaggtccgcaagcggacgttctggagcatctactgctgggacaagcagagcggcgcgtgctttggtcggccggcgatgatccacctgcgcgattgtgacgtgcccgagccggtcatcctcgacgacgagtacattacgaaggacgggcttggcagccagcccgacagcacgaaatcccgcatctgcgcctttgtcgcggccatcaggcttcacattgtgctcgagggcgtccttgacggctgcgtccggccctcggactttgcagcctcgccgttcctctccaaggccgcaaaggtgattgcgaagcggcatccgcagtcggaggccctgcgcgaggaagaggccctgctcgaggactggcaggggctgctcgagccccactgggcgtacagcgaggtgacggttggcagcaaggacccgatccgcatcacccaggccgagcggctccactgcctcgaaaatctcgtcaagatgcgtgcgtcccgccccgcgtcccgctccgaagtctctctttgcgttcttcactcagcgctgacaacctcctgccccttttcgtcagtcatctaccggcatcgcttctcgggcttcgttctcagcccggccgagacgcccgaagagcaggcccggcacctcgacctctgccggacggccggcggctgtgcgctcgccatcgtcgccgaccacctgcacattgtccgtctctgcctttgctgcacgttcgcgcgtgacctctcactgaccccgttatcgtgctcgctcacctcaccccagtcgcagcgaggcttcatgacctactatggcgtccacgtcgtccaccagctcgcccaggccggccggacgctcctcgccgttatcctcaactgcaagagcccagagtcgcgccagctcgcagcctcgagcatcgagggcttccgatcgtgtgtcggtctgctccgacgcttctcgggccgctacctctgcggcctgcgctcggccgacatcctcgaggagttttgccggagtcagttcgccgttctgtagtaggcgcctgacattgcgccccatgctgaccctctttgacgacgccgccctctctcgtccagtctgccatgtgccggtcgacctgcctcaggtgccagacgcagccaagccgtcgccggcctggctccggcccgttcgacgccgtcactcgcgctcgccgacgcgcgagcctatgcgcgaacccgcctcggcctcgccagcgtcgacgaccgacttcagcggctcaggcgttctcgcttcttcctcctcgcccgtccagcccgtcactctccgccctccgccgccacagtcagccgccgagccgtcggcgacgatgtttgactctggcgagtttctcgcgacccaggcgagctttggcgacctcaaccacgacgagcccgacgactttgtgttttcgacagagtttttcgatctcaatgccgcggcctcgccgccttcgccgtttggcaacccgctcgcggcaggcggcgctgcggtggggccgacgctcggcggcctctcggcgcagtcgggcgcaacgccgattccaaacgtcaacggctttggctcgtttggcgaggcgatggactttgacgcgggaggcctcgggcccttcccgagtcggggaggaggaggcagcaacggcgtcggcggcgacgcgctgaaggacctcggcctgccgagcgcagggatggacggcctgatgccgacggtcgagggaaccgagaatctgtgcgtcttcccgtcgccatcctctcgtctctcgcccccttagcccactcaggctgacccttcctctcccctttgacgctcgccttgcaggtcggcctcagagatcctcgcgctcctccacgagggcgactttgattactctgcgctcttccccgaccagacgcggggcgattcatgattggccctcttccacgccactttcacaagcgcgcttcttctttgagaaaaggagttctgtccgcccgatgcgggcggcgggcgttttgatcgttccgacgcccagtctgtcgccagccagtctccttgcgtcgcgatgagacgagcgtcaacgcctcgcgaggctgcctcactaagaccgacgccagacccccgccgtcgtcgcacggccaagccgggcttgggtagcgcgtaagactgacttgacgctcgacgagttggggcagggagcgtgagaaggaacatcttcagcgccggcgatccgttgccttcccacccccgtgggggaggaggggtgtgggtgggcggtggaaggcaaagaaaggacggccgaagctctcttcaagagaaggtgagcgttggctcgtgccagacgacccgcgcgcggagcccccttccggccggcccgcagcagccagcagagcgcctgtctgccccggagagtcagcatgcagcggccgaccagcagcattttcacggggcaggctgccaagaccgcctttcttctcgcagaaaagcacgaggcaggacgaaaaagcacattacagaaaaggcaaggaagccgcgcgctcaacaacctcccttctgcctccaagatccttcaacttcgaccagcctgcgtgcgtcgcacggcagccagcaagactcgcgctagacgttccagccctcggccttctgccgctcgtgctccttgcgacgggcctcgggctcaatcttgccgtcggcgacacttgtctgccagtcgacgccgtgcccgacggcgtacggccggccggcctcggcccagaggtccttgatcttctggcgctgctcgacaacccagtcgtcccacttgagccagtctgtccaggttgagtgcgagcagctgttggcgtcagccgtctggcaagcaggtctggggcgaaagtagggcagggactgacggagcgcaaccgtgctctccttcaggtcgagctggttgtagtcgcccatcgaaaagccgttgtcgatcgtcgtcaccgggtcggtcgtcgggtcgaggttgcgcagccactggcccgtccgggcgtcttcccatttgtagatgtgggccggcaggctgtcgaagggaagggtgaggcagtgcaagcgtcagcaagagcggcttcagctaagcaagcacgggcaagacgggacagacatttccgcccggccgatccaagcgacctgtaagggaaagcgaagaagcaagtgtcagtcacaagggaaagggtgaagagaccagcgaccgtcaaaggtcgacgcacgagcggccagctgagcgcatagccgagcccgcgcatgtaaaagccaaagtggcggctcatgccggccgacgtgccccagtagatgtttttcgagcagtcgagcgaggcaaaggcgtcgatgacgttgggcatgaccatgaacgtctgtaattcagagaggcgggcgcgaccaagttcagcacctttaggtttacagacgcgcgagaacgacatgtgactcacgtcgtcgtcgtgcttcctgcaaggcaacagcgagcaaggcagtgcatcagcttgtgttcctgtatgggatcgtaaagcgcgacgggtacgcacatgacaaatttgggcggctcgccgtaccggcgctcggcgacccactcaaagaaggcaaacgtctttccgtagtcgatgtcctcgacggcgtcgacaatctgaatgtcaccatgcgcctcctgttcgtcggccagcaaccgctcgtacgcccgcgttgtcggccggccaaagatgaagcggaactcgacgagctcggacggccagtctgggatgaccttctcgcggaggagccggcggcggtcgactttgtccggcgcagaaaagatgccgatcaggaggagcggcgcgccagagtggtcgcgctgcgggcagccgatggtatgcggctggggcgacgtcaggagtgcaaagtcaggctcctcgaacgagcgcgagatgttggccgccggcgtctgctcgacgtcgtactggtcaagcggcggcaggtcgatcgacaggatcgagaacgagaatagtacgccgacgaccgtcgacaggaagcagagcgccagcagcaccgtccgtgcctttgaccgtgggatcaggagcgagtaccacggccgacgtctcggcggcgcgtgcgagcccgacgacgcggccgacggcccgcccgtcaacggatgcgacgcgtgcgcgccgttgccgggcgaccgattgcgcgagagaaagctgaacggtgaccgtgggtggagcgaaagcgacaccggcgagggcgcagacgtcgaggcctccatgaggccgcggagacgaggacggtcaaaggagctgcggtgctcgagttccgggggcggcgtgcgtcaagcgaggtaaggttgaagcggacgacggcgggttgactgagtgctctcttggaccgagggtgtctgaagggactcgcggagggttctccgggagctagctggaagagaagaggaggccgggccgctgggaaggagaggagacgagagtcgtggttcgaaggacaaggatgccggagccggccaggcggagaagcaaggcgagaaacgaagcagcggccaacgacgacaccagccgaacctccttttctcccctcccctcatccgggccagtttgagagccgttggacgccaagaaactatcgtacgacaccctgctcggtcttctctattgtttgaggccggacttcgccagctacaggtacgtcgtcgctcagcccgcgcaacgagctcggacgcgagctcgatctcggccatctcgtcctgagaagaggacgctgggccaggttccgcctcatagatggtcctgacggtctttgctacgagcagccgttcttcctgcaagcttcctcctcctcgtcggactggctgagcggccgctagatcgctaggcatggccgccgccgcccctcgctcgacctcgagctcgctaccgctgccggacgctttcgccgtcgaagagccgtcttcggccggcgcctcgacctcaaaggatctcctcgcaaccctcgacccgtacggcggtgatgtggccgcttggctgaacgatctcctcgacccggccgacgactacggcggcgtctcgctcgccggcgacgaggtgcgtcctaatctggccgttggagcgcagggaggtcaacctgactgacggacaccgcctctctcacgttacgtagctcgacctcggtgctgcagaccagaaggtccggaatctgctgggccggctttccggcctctcgcaggacacgtcttctcagctcgagtcaacgatccacgagatctcgcggacggtcccgcgcctgacgtacgacctgcagttcatgcgcgaatcggctgccggcctgcgtgggtcgcttcatgcgatcgagacccagtcaccagcgtcgggtgtaccggccggtcgcttcctgatcgacggcgaggcgagtgaccagatcgacggcggccaggaggcccgggcagcagccggtgccgggccggatccaaagaccaaggccgtgctcgagcggctcgagtacctcgacacggtcaagacgggcatggaggccacgctcgccgtcctgcaggaggctgagtcgtggtcgacgctcgaggccgagatcactgccctcctcggccaggcgcagtacctcaaggcggcgacccggttggccgagtcgtcaaagtttgtcaccctttttacgccggcgacctccgagtacgaggcccggcggtcactcctggtctcgctccagaaccagcttgaggccagtctgagcactgcgctcgtccgcgcggtcggcgccaaggatcgcgaggcctgccgcagctactgggagatcttctgcatgatcgctcgcgaggacgagtttcgcggctactactacggcgctcgccgagcacggctcgtcgatgactgggcgacggccatcctcgtcgatggtgaagggtctggcctcaaagccgaggcgacgggcagcagcgcccggccggtccccttcgccgactttctcgcgacgacctggttcggcgccctccggatgctcctgcaggaggagatgtcgttcctcccggccgtctttcccgatccggtccagactctcaccgcactcgtccagtcgatctttgacaaccttgcgccgtcctttgcgcagcggctcgagtcgctcgccgagtaccacggtgccggcgccctgccggagctcattaagtgctacaaggcgaccgagcagctcgcagtctttatccagtcggcgatggagaagctgacggcgacgcccaagccgcccaactcgcccgtccttcgctcgccagcggccggcgcctcgcacggtcggcgtgactctcgtcggctgtcggcgtactcaatttcgatccctcgcggcggctccatcggctcgctcgacggctcgagtacggcggctggcctatctctcgagcctggaccttgggaggcggcgctttacgagccgtttgtcgaccttcaggccgagtatccagcgctcgagcgccgctttgtcctcgctcaactcgaaaccgacggccacatgttgtcatctggctcgactagtgacgatgccggtgggggaggcgacctcgctcgcagcatcggtgagcagtggacggccgtgctcgacctgttgcaaggcagcagccgacgtgcgctcgacctcacgcacggctatgcggcgacgggactcgtcgaggtcgtcaacgaggcggcgacgttcttccttgctcgaaccggcaagctcgtcaaggcaaagacggcgcggcggcctgtcaagccaaaggcggccgacggagacgacctcgacgagctcaactacgacggcatggactacacgtccgaggatctggcaatgttccagctcgcgctgcatctgctcggcacctgccgtcagatgcgcgaccggctcggggcctttgagacagagctcgtgcgcacgctgagcgccgtcgcgagtcgcttccttggcgaccgggaagagccgatcaaggggcccgtcctcgagggaacgacacgcggcgcagtcggtatcctccagcagtcgacgctcaactcgcgcgagctacatgagctcttcgacgcttttcacctcggcggggtcaaggcgccgattacgggtcccggcggtcggccatcgctccctggccacacgtcgtcctcatcgtcgtttgtgaaccatcatctccggacgccgtcctttttcccgcctacggccggagccggtgcaccgccagcaaccaacggccacgcccatcccgcctcgaccttcggcggcggcggagcgtcaaccttcccccccgcctctacccgacctccgccgccactgctagacccggcccgcgaagcgctgcgcgactttgtcgtcctgacacaagtcttcctgcagcagacgatcctcgcaccacttctccagctgctgtcgacctaccctgcgctgtcggtcttccgtgcctccggtagtatctctggcggccggccaaagacgctcgccaacgtgccgaccttcagcctgtcgccgacggagacaatttcgcacgtcgcagagggccttctcaacctgccgcggctgtttgaggtctacgcggtcgacgacgccctcagcttctcgatcgagacattgccgttcatctcggcctcgctcttcggctcgtcgtcgaccgatggctcgctctcagcccctccgccaccctcgtcgggcacgatctcgccttcagatcgctcgccgctttcgtcgcctgcgctcgtaacgtcaaatgcacaggcgcccgtgacggacctctcggccgaacgcgtgacggccctctcggccgaacgcgtgacggccctccacctgcagtcgctcacgtcgacgctgctcgcccacctgctggcgacgacgctcgccgccttcccggtgctttcgccagcaggcgtcgagcagctggcgaccgatcttgggtacctcgccaacgtcgtccggagcgtcgacgtcgactggagggagggcgaggagctcgtcagcctcctcggcaagaccgagaccgaccttggagtcggtgcatcgtcggacggcgagctcgtacgcagagtgcggatactccgcggcctcggtggggcggccggctcgacaccataatgagatgcccatcgacgagcagtgccgaacaacgcccctgccagtctcgctacgaaagcgcaaatctcgagaaaggcagctaacaaaaggcatgacgagcacgaccgacgatcgctgctggcgcggcgaaagaacggggctgagaaggctgattcagatgctgtcggtggcctctgacgagtcgccgccgtcgttactcgtggtgttccagtcgtcctcgtccacgtcagagctgacgtcgtcagcatctgactcgtctcgcatgatgaagagcctgcagaccgggagggaaggatgtatgcgtcgtcagctggccgagcggctacgcacgactggggtcagagagcgacccacttctcaaactcccaaaggtgcattaggtagaagacggcgaccgtccgttcgcgaacaaaaacagtcgcggccggcacccagacctcgtccggatcattaccgaactcgccgccgtccctggcgtcagcggccgcctgagcgccccagctcatcccggcggggaactcgtgctcggtgtcgcaggcgtcgcagacgaatgtcgctccctcagggaccgtcagggccgtcaggtcgtgccaggcgtcaaagacctgcttgaccgtgataccgaaggacgactggatctcgacctcgggcaaaggcaggtcgatacggtacgcaacaatggcgcgcgtcaccggcggctcggtcgcccgctcctcgacagccgatccgatagaagcgagcggaattgggtggccctcggccgtcgtcggctcgacgaaggtctcgccaggggcggacgtcagagccggccgggtcgtgaggaggaagagcgggtggagagcaaagcgttcgggccgcgacttgtccatgtgcgcgactgcatagcgcgcggcgacctcggtgtcggacctgccacggaacgtcaggtggccgatggcgggacttgctacgagtgcggcgaacgcctggctgacgcgttgaaggcggcgcaggtcgaagtaggtgaggcggccgaggatctcgagccacagctcgaccgggagctcgcgcgagcccttaagaatcgggacggcggaggtggacatcgccaggtggatgaaaggctctggagtcgacggcgtcggcggtgtgggttgaatgctggctgagagagtgcagggcgggccgtgagtggcggttgagggcgagggcggagttggtcgcgcggcgggccccgaagcgcagcggccgcctcctccccgaccgcgcaaggccttcattcgtgtggtcgcacagcgcgcgtcgctcggacaaaggcggtcagcggtcagcaccagacgcttggacttcattgcccgggcccatcaaagcggggcgcccccttgaagggcagctgaagagggcaggccatgcgcatcgacaagaccaccccttctctagctgctgacacccggcccgctcttagacggccgagtagtccatcttggtctcgtgcttcttggcgtcctgcagcttgcggacggcctggtgggagggacgagggcagatcagtctcagacatggctcgatcgagggaagacgcattcggcccaccttcatgaagtcctcctgcaggcagtgctcccggtcgtcgcggatcgcaaacatgccggcctcggtgcagacgttgcggaggtcggcgccgttgaagccgtccgagagcttgaccatcgcctcgtagtcaatctcgccctgcttgttgaccggccgggcgtggattttgagaatctcgagccgcgactgttcgttcgggagcggaatctcaatcttgcggtcgagacggccaggacgcaggagagccgggtcgagcgtatcgggccggttggttgccatgatgacctttgtcttgccgagcgagtcgaagccgtccatctggttgagcagctgtgggcgcagcgggttacaagtcgtcagccttctcgtttcgcgcaagaaagtctagccatctggcacgacaacgagacgcacttccatcagtgtccgctgaatctcgcggtcggccgacgtgccctcggaaaaccgccggccgccgatcgcgtcaatctcgtccatgaagatgatgcacggctcgtgctcttttgcgtaggcgaacatctcgcggatgacgcgcgccgactcgccgatgtacttatcgacaatctgcgcagaaagaaggggggcagagtgtcagatgagaatgcggacaacggcagaatgaccaggggtcaggacgcaccgccgacgagacgaccttgaggaagttggtgttcatcgtcgccgccgtcgcccgggcaagcagcgtcttgccggttcctggcgggccgtatagcaacacacccttcggcgccttgatacccactctctgtgctcggccagaggtgaacgatcaggatcagcctttccgctcagacaaggcgaagggcatgagcgcagacgcaccgtgaacagctctgggttgagcagcgggagctcgataacctcgcgcagctcgcggacctgctcgccgagaccaccgataccggcaaacgtcgctcctcccgggtcctcgagcgacatgctgtagacgagcgggtcaacctcgcgcggcaggatgcgcatgattgtcagggtcgtcatgtcgagcgagacgcgcgtcgtcggcagcagctacaaagaaagcagcaagataggcgttacaagatagagcgagaatcagcaagcttggccagagcatcagatgaaacttaaaagtcgaaacacaccttctcgactggcagctgtggccgatacgagacgacgtatctcggtcctgagctggccttaacgataactgcagcggcggttggcagcggtgagcaagcacgggtcagctcggcccagtgaaagtccccttccggtgtcgctgcagtcgcagacaactagcagtcgcgggagtgaagagctagggaggcaaggggacgcacagcgctcgtcatcgagcttcttgagcacctcgccaataatctggccgacgctctgcagcgccttgatgtcctcctccgactggtggtagtccttgtcgaggtcccggatcgagaagcgcactgccgacgagagcagagcggtgcggtcagttggcagctcaggcggggctcgtcgggaggagaacgcacgcttcttgagattctcgctcgtcgtctcatggtctttcaacttctactcgccgtcagaggggggagccatacggtcagatcgatgtctcacgccgccagaacctttcctcctcgggcctggcgccatgcccagctcgaagtgcccaggcctacgctagagcgtcgacgggggcggttggcaggctgagatgcaccaacgcacctgacggtagagcttgagtgcctccttcttagccgggtcaaaagcgggccgtgctgacggtgccggagcggtcgaagaggatgctgctgacgggtcgtccatggcagaagctgagcaagagagtggatgaaggtgtagagtgatggcagcaaggcggacgaggtcgcccgggctggcgtccacgtcggcgcgcggccttgctgaaagagcgtccgaagagctttcggaggcagcgacttgcgcaggaaggcactgttcatcctctcgtcgaccgccgctccgctgtcgccagaacgcagacgtgcctcagatgaagaccttggcacagcatctcgatgatttacagtacaggatgaaaataggaggaagaaagctgagggcgggcaccggaccagcttgtgctctgcgcgcgctgcggtcgcggcgccgacgagctgccgagcaggccgaagctgctcagccctctagcccagacgtcgaccatcttgccctgcttttcttcgccttcctcttcatgtcgtcatccctcgcgtctctcgtccggccggcaagcctcgccgtaactggaccttcgcggctcgccctcggccggtcctttgcgcgctcgctccctgcccggtccgagaccgcgcagggtgtgccggcgaccgtcggctcgctcaacgtccgtcctcgctccgaagcagctcgacgaagctgaagtgctgaagtcctcgctcctgacatctcctttccgcgctttggctcggttctcgacgcctctagcagcccaagcgtcccatcggccccttccgcggaggcctcgtcggtttcctgctcggcttctcgctcgcctcggctatggcaagctaccacctctgggaggagtacaaggccgcgagcagtctgctgctcgtcagcgtccaggagcttgaaggcgccgttgccaaggtgcgttttctgtgactcccgctgtacgacattggtcacgagctgcccccggccaaccccaaggaggtcgcccctcgccttgaggttgttacctgcactcgcttctccttaacggatgctgccttgctggtcatccgagaggctagcgggccggcgaagcttctctccgatctgttgcacgccggaatctccttcctgatatgtttgctgatctcggccgcccccccttcccctcctgcagatgtcgaaccacgtctcgcgcatcgagtcggtcgagaagcggctcgaggccgtcaaggccgaggcagcccaaaaggccgacgtcggcaaggtccggagcgagatgaagactgtctttgacagcctgcggctcgaagtgctcgagtgcgtcttgcgccggtctgttgctctatcgcgcttcgagcctgtacgactgactcatcctcgtttatcctctctcagcattaaatcgcatgtctggggcgttgagcaggatctggcgtcgctctcgaaacggacgtcggtacgactcgtatagatggttctcgggagacttagaaggggcgtcttcgggccacgcgagaccccttgtcccggcccagcgacgaacgaggcggtcgtcaagcgatagcagtcatcagtatcgaacggggtatctcaagccccggcgtgtcgttgccggctaccaggcgccgtagccggtctccagctcgcgcttgaagtccttgacggcgtcctcgaagcccgtctcggcgtcgtctcggacgaagcccatcttgagcgcggcctcgtttgtgaaggcccccggccaggccttcatgacgtggaggatcttctcgtcccgctcgtagtcgacgagcgccatcacctcgggcccgccgacggcggcgagtgcgtcgaggatcagccggggcgtcgtcgtgatgccggggaggttgaccgtgcgcgagtgagcagggaaggccgaggccggcagacttatcgcgtggacaaaattgtagatgacggtcgacactcgcgagagatagacggggaagcgcgagaggttcgggtcgtccgggcccgtcgcgacggggcagacgcttcgcttgcccatcagaggctcgcgaatcaggcccgagatgaaactcgatgccgccgaggacggtgcgccagcccggatcgcaaccgtcggcaggcgaaggatgcgaccgttgaggaggccctttctcgagtagtcgaaaagatagagctcgacgatggccttcgctgcaggcgttcgcagcaggcacgagtgtcagctctttttggcggagatacagggcactgtcaggacgtaccagctccgtacgacgtctctgggaagaggggcgtcgtttcgggctcgactgtcgcctcgggcagacagctggggccaccactgcacgggacggttgagacgccggcgtcagaagctatggcgggggaaatcacaagccaccttgggagggactgcgcactaaactgccagtccggaggcgaagacgtagatcggcaagggcgcgtcgccgcggacgtcacggtggtgcgcagtcgttgccttgaggagtgccacatgcgaatcgacattgaccgagtagccgagcgcaaagtcggcttcgctaccgagactcatcaggccttggagagctacgactgagtcgatgcggcggccagcaaagacctttgcgaggtcctttggctcggtcaggtcggccgcgagcgagacgatctggtccgctttgccgtgcaacgaacgcggaatctttggcgcagcgatgtcggtcaggacgatgttgaggtccgggaagcgttcgagcaacgacaggagcaggcgctggcctacaaagcccccggcacccgtgataaggacggtctgcaacatgaaaggacaggtcagccatgcggtcgagccggcgctcttggttgacctgttcgcccgcttctggacagccgggcaggtacgctgctgtctaccctccctctgctatctcctgcgcatgagggctcgtagccagaggagtataggagctggacaaaccttgacatggctcgggagggagacggaggggtagctgcgcgcggacgagcgagaagggtcagcctctcagcgtctgaaccatcctcaaagcgcacgacgtacgacatgctgtgaggaggagaggatacgctgtgcagatacaaggaggaggtgagcgttaggcgagagtgagggacgacctgtcgaccaggagaagcggatcagccggctcaacctgcccgggaccgggccggaaggacgtgccttgagccggccgcaaccgaggctgccgccagctactcgatggtagccgacgacgacgaccggtcagagtagtcctacagcattgcaagcaacgatcggatgaaagaagccagcctgcttgtcgtcgtcgtcgtcgtcattgtcgttgctagtgtgggccgaaccgaagctcgtcgctagctggctcggctggcctagcccgctgacaggctcggccgacgacgccccgctcgaaccggctggcccgcgacgagacacgcgacagaccagcccgtttcccgcctgaagccgaccgccgcactccctcctctcaccactctccgccggcaaggcgcccagaacctttgccgcagcccgtctccgcacgctgacagtcggcagggttgatcgacgtcgacgcgactgcgggcccgactcccttcgacgccgccccgtcgtcccgccgctgcggcggcggcgactccaggacgaccgggctccctgccgtcaccacccgcccgctctggaccagacctcggcctgcgggcaagccgctgacaccagcttcctgaggcggctcgcgtgagcgacaaggcttatagtcagtaggagagaggaggatgtcgacgcctctcttacatcgtccgcctgtcgcctctgctcgccccatcccccaccctcctcacccccccgctcggcatcatggtcactcaccggtgcgcaatggaacgacctgttctgctggcttctcaatctcggctgatcatgggtcctcctacagctctctcgtccgcccttcgctcggccgccgccgcgcaacgtctgccctcgaggccatctgccgccaggtcttcagtgagtcgattgtccctcacgctggcgtatccatccgactgaaactgctcacccttgcagaaacggccgcgcctgccgttgcctatccgctcacgccaccaacgacaccgagtgagctgcctcgcaccccacgtcgctggactccctccccgggggcgcctctcaggggccgccgcctcgcaacgctagccatcaccgagggcggacgaaggcgctacatagtcgacctcgagacgggcgccaagttctgggcggtcgagatgccgcctgcgcgcttgagccaactcctcgaagaggcaccgctgccagtgacgcccgcgcgctgccagcgacagcagcagacgcctccgaggacgccgtagggagcactcctgctcaagcttgtcggccgctttagcatccgatcggccagccttatcacgcggcccaagcaacagtccctcgcctcgcgccagaggcaccgacggtatcacgggttgcgcgcccgctgtcgcgccctgtcgttcttcgcaacgccagccaacacgcaagccaacggtcaacactgccggccgtttcaagcgagcacagtacttctagcgactgctggcgagccggtcggcccgcatcgtcggacgaatcggcgctctgagcaaggtgaacagcaggtcggaccggccttcgctgtggctgcagttctgtcaatcttccccgcacccaaaacgtgcagggcgggctcccggccacaagcaaaggtccaggaagatgagggatctctgcgcagatggcaggagtgggtcgtcccgggccttcgaatagcatgatcttgtcgtgctcaacgcagctacgagatacatcttgactctgcgagtacggatatgtcagagccgtccagcgcaccctcttggaacagacagcagcgagaggtgggtgcagacaggtagagaggaggatcttgccagtgcctggcagcgaggcttgaatgcatacgcaagtggaccgacctctcgacgcccgcgtcgatcgcctcagcggaccctcagccgactggctccctccaccgactttcgctttgtattcagctctacctccatcgccaacgacacctcctctgcgacgcctccctgctttctctcatcgtctcagctacatgtccgccagcagcatcgcccgcgtgcggcagtcgatcgccaagcagacggccgcctggccgaaggacgtcctccggccgcaggtccagttctcggcctgcttccagtctctcgtcgatggtcggctcgaccagctcgagaaggcgggtaatcagacgctcagtgccgaagaccgggccgtcgtcgatagcgtccagactggcctccgggatctcatggccaacaagtggcgcgaccaggttcgtctggcgtcgccgccgacctctcgaccctcttcggctcctgacctctcgactacccgcccgactgcagtaccccttgacggagaagtccctgataccggcgtcgaagccgacctactacttccgaatgcaggatgcaatcgaccgcgcccagcggggcgagggtaagccctggtggcggaccttcttcaaccttgaggcggccggcctccagcagcgcatcgacacgggcgagcttgacgctcgcataggtctccggcggacgacgccgctgccgaagcggtcagcgtagcctttccctttcctcgctcgatctcccgtcagacttaatgaaactccttcacgacctctcatctgacgcgctgacgggcgcaagggcggcgcagaggcacacggcgcagctcactgagaagggggcgactcaaagaggagggacgggcatcgcatagcgccgtgcgggtggcgcacaagagccctttttcacaggtccttcttggcctcggcgtcgttcttggcgcggagcgtcttgccgttgctggagcggtcggccgtaaagtcgtcgagcgcacggagccgctctggcagggttgggtggctgtggtggtaggccgagtagctgtaagggaagggaagtcggatcagccttccacagcgagggcctgtcggagaaagagacacgacgcacagccagtcgtggttgatcgtgctcgcgttggtgacgtgcaggcgcttaagcgcgaactgaagctggcggcccatctcggcaccgccaatctcgaccgcgaatcggtcggcctcgtactcgaaccgccgggtgacggcattgacggtgagcgcaaaaagcgcgtcgagcgggctcatgacgagctgcgagaggaggaaggcaacgatgattggcgggtgggcggccgtcgccgccgggaagcggaacgagcggaggaggccgctgttgccgaggaagaagtggaggagcgagaaggtaaaaagcaggtgaccctgcgagaggcagaggagcttggtcgggtgcgagcgggcccagtgaccgagctcgtgcgcgaggacggcctcgacctcgtccgccgaggccttctccgtcagcgtgtcgtagatgacgatccgcttgctccagggtaggccaaagaagtagctgcggggggcggagtcgagggtgtcagcgctctggctcgtagaagcaagggaatcgagagccaggactcacgcgttcgagtgcgagctgcgcttcgagccatcaatctcgtacaggtgcgtgagcgggaatttgagcttcgccgcgagcgcctcgactttggtccggacggggccggccggcagagaggtaaacttgttgaagagcggctggatgaaggtcgggaaaatggtcgcgaggaggagctggacgacgatgctgaggagtcgagggggggagggttaccgactgcaagggtcaaagacggagcgcaggcgatgacgcacaggaacagcatgaggtaaccgacaaagctgtcgcccgcccagtccatgaccttgaggaagccggcgaggagcggcaggccgatagcagcaaacagaagctgctccttgagcttgtcggcgacccagaggctgagcgttgacttgttaaagccgtgccgggcctcgatgacaaacgtctggtagagcgccggcaggtagcccgggagcgacatcaacagcgtgagcagcgttgggaacagaagcgattgggcgatctacaggcgcaggagggaccaggagggtggaaggttagtctgttgaggtgcatgcgctggcgaggggccgctcgtgcgctggccgcagatgccgggactcacgccgccgctgcgctcgggtccaagcaagttgcccgagagaatccaaacgcgggagaagccgtcgaaccaaagaagagcggcaccgcagaggtagtcgtaggtgccgttcgcgagcgagaagagagccttgtcgcggccgtaggcctggctcttagcgatctcctcgggcgtctggtccttgacgaggtcggccggcggtggcttcgagtagagcgggatctggcgcagacttggagagtgggacggaatcccggccttcagatcagcctcctcccgccctgacctgaaagccggcggccctggacgaccgacgagggcagagactcacgtcaggtacgactcgaagagccactgggcggtcgagaaggcgaggacgagctgccgccagttgaccgcgtttgagtgggcgagccggtgcagggcggacgggagcgtgcgtgacagatactcaacgatcggcgacatggcttggaaggaggagcgagagatgctgacggtcgggtcggaagggggctgggctgaacgcgacgagaggacacggcccggcggcgaggggccgcgcagctgccgaacgcgagagctagggttattgcgggcgccgcaagaaatctcgatgacccgcgagccgctgctgcaccgtcgagctcgaagacccctgctgctgccctcgacctgctcctcgtcctttctcctcgatactcgtcgctaccagctttaagtctacactagctcgtgccgcaagcgttgccggagcttccttctctcaaagccgtcgtcacagccgtcgctcctcctcagcccgccgccccgcctcggctcagcccgccgccttccccctttctcccccggacgttgccgaccttcccctcgctctcgccgaccgtctgccagccgcgccacgtaccggatgccgcctcgtgccgccgccatcgccgccagcgcctcgctcgggcccgactcgcccaagccaggcacgtcgacgccagccgagcggccgccggcgccgtcgccgctgatcctgcgcctccggcaagactggcgatgggccgcgaccagtcagttctgcgccatgttcctcccgaccctcggagggatcgagtgggaccccgaggtgtgttcctctgccagctctagttctctaggcctgatcccaagcgtcgtggaaggaaggaaggtcggccgagctcggttcgcccgtctcctcaggcgaggctgcgtcgggtccgaacgagccaaccatcagccacacggctctcgagagctcgactggtcggccccgagctctcgtacaagtggtatcgaggagctcggccggcctatcgcaccctcgacgctccgcttcctctcccgcttcctgctggccctgcctcctgcctagattccgaccgaccgacctcgtgctgacgaccaggacgcgtttgctctcgcctctatcgtccgttcggggatgaccgcagaagatcgagtccgactttgaccacactgagacggcccagatcccggccctctgcacgagtctcctgtcggccctcacactcgaccgcaagatcgagtacgtaccttcgcttgccttggtccagcctacgtcctgaccgtcgtcggtctctctcgtctcgcgcagcctgcataaccacctcgactacctgcgcaaagagtatgagcgccgctcgcccgagaccaacaagctcgggacgtacgacgagcccgtgccctgggccgagattggcctcggcgacaagctccaggtgctctgggacctgtgcgagtggcacatggccgacccggagcgcttccgagggctcgtcaacgaaggtggtgcggcagacgtcgaggttggctgggtgagtcggaagactgctgcttgttctacctcaggccaccgcagcttgctgagctcctcgttgccttcctgcctcacgtacagcgcatcaacccggtcggctgggacggcgccggaaacacgtactacctgttcgacggtgcgtcctcgacgtataagagcactctgcaaatgacctcctgctgacacgagatcccttttcctgacagacaaccggctctgggtccagcatccgccaccactaccaccggcaccgccgccaaagccgaaggctacgccgaaagctaagccaaaagacaaggccaagaaggcgccagtcaagccggcacccagagcgagcagacagaaggccaaggttgccgacaaaggtgcgtacgagcgcttattcgctaagcccggccttaaggaaaagcgactgacgaccttctcttttttgatcgcagcgcccccgccgcccccggcacgcagcaataagcgcgctcggccctccatcagctcagctcctcctgctgctccaccgctgaagaaagcgcgatcgacccgggcgagccgtggcgctgtcgaggacgtctggcaggccatccccgaagagtggctgcaagagacggtccaggccggcccttcctccaacggccagaccgcctcggccgcgctgaagggcaccggcctcctcagcgacgacgacgacagcgacctcagcgacatgtctgacgtcgaggacgacgacgacgacctgacgccggtcgaggactcggatgacgagcccgtgccggacgagccgatgccggacgaggaagcggcggatgaagagccggccgaggaggacgaggaggcggtggatgaagaggtggccgacgaggaggacgcggaggaggacgaggaggaggcagaggcggaggaggaggccgaggagcccgcgccagaaccggtcaaggtcgacgagttcgaggaggcaaagacgcgcgtcccggactaccttgagtgggaagctgtgcgtacctctctgtggtaggaggcctcttgttggcctcgacgctgacgcctgtcgtccgctccttcaggtctgcgtctgtcgctacgactgggagacgttcccagagcgcttcgccaacgcaaccaacatcgacgaagtcaacttctacgagtatctcatcgatgtcgtccagccgcaggttaccgccgtcttccgcgttcgttcagccctgtcactgctcttcggacgacagcaagctgacatccgctctaccgctctaaaggaggccgaggcgaccaagaagctcgaggaggcgatccgcaaccgcaagcgctcgtcgcgcatccagttgctcgagtcccagaaggacgagcaggagcgactcgaggccgctcggcgtgcgaccgaagcccggctggaccgggtccgcaaggaggaagcgcagaagaaactcgaggaggacgcccaacgagcctctgaacaggctcgtgtcgaccgtttgcgcgagaggtgagccctgaccgctgaccgcccttcctgcttagccggctgacccttccttgtcgtcctacagagaggagcggcatgcccagcgagaggaggccctgcgtcttcaacgcgagaaggaggaggccgccctgctgctcgagaccacgcgccgtgaggagcgccagatgatccgcaatggcgagctgccggccgactacgttttaacgggcgacgagcccaagccggagccggagccggtcgaggagaaggcggtagaggaggtcaagcccgtcgtcaaggccaaagttaaccttctcgagccgcttgcgccctcgccgtcgtcggagccgacaccctacatcccgaaaaagaagtcacacaagaagggggcgggcaaggcagctgccgccgccgctgccgctgcgctcgctcagcctggagcctggatcgtgcgtacctgtctgtcagcagtcccggacctgttcagcagctgacgatattcttctgccgcccgcatccagctgaactgcgagatttgcaagacgctggaatacagccctctgcagcacggaccggtcgcctgctgcgagaagtgcaacgagtggcagcacacaagctgtcatgaccagttcgctattgccgagcacctgcctaagcgcaactggaagaaggaccctttcattgtgcgtacgcgacattgcggttttgccgttggattgaggctgacccgatatgtctcctcacagtgcgccaaatgtcttaagaagatgaagcccaaggcgccgcgcaaaccaaggccaccgaaggacaaggacgcgcccgcaacacctgccgccagctcgtcgacaacgctttctggaacgttggcgaagccaacaagctcgtcgccgaagaaggccaaggccgaggccggcccatcagtggcatcttcgggcagtcttccgccaaccggcctcgtccaacctgttcagactcacccttccccggcgatgggcccagtattgccggctctcggagcgcccccttggcaacgcccttaccagcagccaatagggccgctccagcagcagtcgcagcaccagcctccgtcctactatcagacgggccaggctccgcgcgggtactatgcgcgtccgaacgccgcaccgttggcatactcggcctactcgaatcagcaaacgcacggcatgcctccgacctacggcggcaaccctgggccgcaagcctactacccccagccgcacctccagaacggctatccgagctatccctcagctggcggccacccatctcagggctacccctaccagcagcctttggcgcaggcgcagctgccgatggcttcgccgtacggccatgctggatcgcacaacctccaccggccaagtctgccgtcgtcggtctcgtccgagcggggatcgatgccggccggcctgccgcagggcggcgttccgtactatgcgacccagcaggcaccgctgtctatgcagaggccaccgtcgttccagacgcacaaatacgcgcccggaaccggtttcggtcagccagtggagtcgcatccggcgccccatgcgcagctgccgccgtcgccggcaccaaggcgaacgagcggccacgccccttcgctgagcgacttgatgtcgccgccagccgtggcgtcccaatcgcttccgcctctcgccccaaacgggcttccgcagaccaacgggcaggcccttccaccgccggtaccgacagctcttcctcgctttgcaccgccgccggcataaagcttatagacgacctttttacgagcactcttccgcatgcgggcgcgccagatgtgtgataggttacagggagggcggcgcagatccccgctcagaggcaggctggtgtacaaggcgctgcacgctcagtccttcgacccgctcgaccgaccgcttaggccgagaccccagaatgacgacgacgccccggaggagcgctgcttgagctcggccgtctgcgtgagctcagccgtttgcttgaggacagccgactggtgcgacagctcggcaaagcgcagcttgtaagagacgagctcgttctccatctcctcgcgggcaaccttggccatcacgaggtccttgacgacctggcagtgctcggtgttaagcgtcgccaagctgctctcgagctgtttgacctggctcgagaggtgccggttggccgttcggaggacgtcgacctcgaccgcgtgcgcattctgcgctcggcagaggtcgtcccattcggcggtgtagccgtccagctggaatggagtgctgtgaagtgggtcggacagaggtcatcatcggtagggattgagacggcgatcggaccagactgaagacgcacatgcgaaccgtgaacgagtcgcgcacgaactcggcactcagccactcctcttcagcctctgtaccgtccgggccagcttctgcgagaggggcctgcgcatcaataagacgaagatcagtcttggccgcctctaatggacctcgcggcccgaccggcgcaccttgtagctatcaaacaggctcgtctggaggtacttcaagatttcctcaaagttgagcttcagcagctgctcctcgttcttgagcaggagggcgaccgagaaacggaagacggcctcgatgccctcggcaaagattgcgtcgaagatgcggtagacgcagtcgagcgggaagctgcggaaggagggcactcggcagcgggtcagtacctgctcacgaggtcgcccgaggtagcagcgggcacgaaccggtagctgaacaacgtcaggaaccactggccggcgtacatagagctcttgacgccgttgcggagaaagtggacatggaggagcgggataagatcctcgacgaggcggtcgaactgaaatagccgtagctgcagaccgggcatctcgggcaggaacgatgtccgaaggccatactgttcgagggctgaggagtcagtgacagcccgagatcacaaagctctagcctcgggcgtgctgagcgtgctcaccgagtgcatcaggcggacccagacgcagaaggcttcctcgtccggcatctgttcggttgacgccatcgtcgtcagttcgagccgtacccctagtatcgtcacaaggatcaagcttacatttagaagcaagcttgcgacgatgaaagccgagccttggacgtagccgacctctgggtcgtatctgcagaggaattgggtcagcatgcgcagaaaatgcgacatcaagctcggcgacgggcgacgcacaggctgtacgccttgacgacgttgaacagctcatcctgtccgcgcccacggtcgtcgaggtctgagccgtcggccgactcgggccgctggaagaatttgtgtgacgggaacgtccgcgttaagtccttctgaatcgccttctcgtgcggcgacgactgatgcagcaacgacgagtacaggctctcgagctcggtgtcctttgacgacgacactgtgttgacgggcagcggcgggtcgttcaactgtcagttgcgtcctgcaaaaaagagcgcagacgagcgaccaatgcagcacgcactcagctgccagatttgtcctcggatgacgtctggaatcccagcttggatcgcctggctgagctttgtcgggtttgatcgagcgacctgctggtagtctgtcagcgcgagtacatctcgcattagccctcgtccctgcaacagctcacagcagctctagaggactcaccattcatgacttcgccccagaagctccagtcgacgttctcggcgtcgtcgtcgccggccgggtcaatcggctcgtggacgagctcgccgtcctcttcgcggatcgctcggccgccgtccgagccgtcgtcggcgtgcgacttgcgcgacgcccggctcgtcgccgagtgcctacgcgagcgcgaggctgcccattggagatgggcgaccgacgaccggggactactcccgctcacgtcgccgccggacgcgctccgcccatgcgtcgccgccgcccggaggcgctcaaagtcctccttgagcttgctattgccggcgtcgaccgactggcgatgctccaactgtcgagcggcattggagatgagaaacgaggaccggtcggcgcgtgaccgtcgtctcatggcttcggcaaaggcaggcgatgatggcgagtggttcagcagcggcgagccggccggcgttgaccggggaggggtcgcgggagtcgacggcccgtttagggtgaccgccgtcaagggcccgtcgtcgtcgtagggcgtgtcggctgcgtccagcgcgagcggtggcggcggttgagccgacggcgatgcagcgggtgcatgctgcgagctcagagggcgggcggtagacgagctcgcagacgcgctctgctgagccggcgcatcttgaggcaggacgaccggcgagccgagcttccgttccgctccagactcagatgatgatggaggaagctcttcgttgctctcactctggcctgcgccgtcggccgagccatttgagacttgggacgagcgttgagaggaaggatgaccctcgctgtcgtctgccggcgaagaggggcgggagctgaccatgcgaggcgtcgagcgggaccgggtgtggttgagaagacggccagctcgaggagaagagcttctagcttacgtacgccgaccagcggagagtccttaggaggagagacaacagaggggcggttggaggaaggagaagcgagatgctggtttgaaggtcggagacggcggtgggacaacgcaggcgacatcttgtgcaccctgctcgagtctgaatcggccggcgaccgcctgcgtttcagctcaggccgtacagaggaccgtctccgaatcatgctcaagcagccattcgccccgaggactgaagcaaggctgactctgtctgaggagggccctccgcctgctggctgccaggcgaagctaacggcgagcgcgcagcagccgatgtgacgatggtgaccaggagtgaagaccatgtgaagagccagaggagacacaaagagagagaaggagcggggacgggagccgaacgagcacagctttgttgcgacgtggagtggacggccgcgaaagaccggcaatcaaagctcgccggcgacgtcggagagcggtcgcggatgcgcttgaccgctgctcgtgtgtcgacggtcgcacaacgcggaccgtgcaaggtcgttcgtcgcgtacgctgcggggcctgagtatgatttgtggatgccttggggaaggaaggggcgtgacgcggtcgatctggtccgagctgggtatcagtagatgatcttcgtctacggcaagggtcatttgacgaggggcgggacgcacgctgattactgggcgaggctgaccaggtgagagtcaagtgtgagcttacttcatagcgagctggatctctttctccttctgcgcccgctgcttcgcgagtctggccttgcccgcgcctgccgagcatctcggccaggatccggcgtttctcctcagccgcgtgttcgcgtgccttggcgtcctcctcgagcagcacctgctggagcgagtggccgttggcgtttgcgtactcgacctcgagctggtccagtcgagcctcaatgtcatcctcgagctcgccgatccggacgtggatcacctttggcaggttgtgcgtgaaccggcccgggttgccctcgcaaacgtcgagcagatcgagcaggcgcatcaggtcggcccgcgctccgagcgcgagcggccgggtgtagccccctttggatgccgccctgagcgacggcggtacgacgagccggagcgcgtccgtcatgcgcttgagcagacgcgactgaggaaagacgaccgcgtgctcgttgcgagttgtctgcggcttttcgggctcgggatcgcgtcggagctattgcggcttctgacgctcgcggacggcttggtcctggtggccgggcagcttgactttgcgcggtttcttgatggtgccgtcgttaacgccggccaccggagcctgcgtaggaagccacgggttgccggagtcagaagatgcctctccacgagatcgccgcaggctcgacgtacgactccggtcttctccatgactgccaggtccagcaagatacgcgtcagccaacggcaacgcaggcggaagcaacgcgctgaagctgcagctcgacgtacccgctcgctgccgcgccgtcagcttgcgcggcgtggcctcccactgggcatcgcgttgcctcttccgctctacatttgcgtggtggtcgacatgcttgactggcgcgacaggcttggcctcgacgggtgcgatgccgagctacatcatgaatcgctgccggcaggccatgcgacgcacctcttgagccgcttgcgtatagacggtcgacaaggcataacgccggggcgcgacgggcggcgacgacgcgcccggagtgggtgacctgcccttgacgacgtacgcgccgacggttgctagggctagggaccggcctcatgctccgggccagccttccgtcgcctgcgccgcaccatcgcagcgtcggccgcttctcatctcgaccatcaacccccttcgcacctccaacacaacaaactagcatgaccggaacccaccgccacgagaccgagcagcacggctccgagactcagcccgagacggtcaaggtcgtcgagccctcgggccagaagcaggtgcggcaacgttggccgcagacgaccaggcctctaacgatctcgatgccgaaccctaccattccatccctaccgccttggcgccctacagcccgtcgagtcggacccgctcaaagaggctgcccgagaccgtgtccacgagcagaagggcatcaaggtcggctccgtcgacggcaagatcggtcatggcatggtgcgtcgccgctcgtgcccttccgggctccaatgcaggtagatgctgacccctgtctacctctctctggtccttcccagaccggtcagtttgttggcgaccactgaagcggcagatgacgcaaactcgaccgtcgtctcgcgcttgagcagcgtgacgtcaatcgaccaggcttcgcacgcctccctggcctcgccgagccgcacatctccgcccatgtattgaccggcaactccctcgactcgatgtagttatgaccttaaccttctgcagactcagtcgaaggcacgatgcctgcctcgattttctcgtcggccgttcgttggcggcgccgagaaacgtccgatcgcaagtcggacttctttcagtcgaggtctcctttgcccctcatccagagaggggggatcttaccaggagacctctccagtctcgacatggtgggaagacgactcgataatctcgtgcatgagggtgcgcagtcggttcggacgcagcttgctgttgcgctcccttggctgtcgctcgcgcacatgtcttctcctcgtccgagtactcgttgacaagctcctcctgacgctgcccgtcttggccgagtttgagcgtcttccttagacccggcgtcgtcggggccggcttgggccctccagtcagccgttgccatggcggcgatacgtgaccctccgcgcggccgggcagagggagcgctcccccccgtccctgaccttctctgccatcagcaccaatcgatgatcactcctctccgtttcgccctccgcaaccccctccgcaccgccacccttacccgctctttcacctctacctccatcaagatgggcgtcaccgttgactcgatctccgccggagacggcaagaacttgtgcgtccttccgtctttccttccagaagctgcttttcccccatcgcaccccgtttcggaagctgacccgagctgtctctctcttaattttgctagccccaagaagggagaccgtgtctccatgcacgtgagttttctccggtctttgatctgaagcttgctcgtctttgctgaccctccctggcctcccgccgttcctctccatcttcgacagtacgtcggcaccctgctcgacggctccaagttcgactcgtcgcgcgaccgcggacagcccttcgagaccaagattggcgtcggccaggtcatcaagggctgggacgagggtgtcccccagctgtcgctcggccagaaggccgtcctgacctgcacgcccgactacgcctacggcgcccggggcttccccccggtcatcccggccaactcgaccctcaagttcgaggtcagtccggttttcaggctgctttcgctcgcagggtctacagaggctgaccctccctccttgcccgccaggtcgagctccttaagatcaactagtgggtgtagcgcttcagattcctggctccctcacctttgctcgccggttcccacagctggagcttaacgcgcaaggcgggacctgtatccaacagtgacttccccttatcagcatgatcctgtgttctttggtcctgcgccgtgcttcatggagtttgagaccgactcgctctgcgtccgcccagaggctcttacttgtaagctggcctccccagtcggctcggctgagcaccggtctcgacgaaacgagcgccgtgcagtcgcagtctttgagaaccgtcacagttgtcgggcttgggcgtcatggatcttcgccatcctcactcccacttcttggcctccatgccgtccggcggcttgacctcagtcttcttctggccgatttcggcccagtttgtcgacaacgtcgttcctgtcgttccgagcgagcaccggcagttgagcaggatctcgtcagtcggccgatgaaggattagtcggcaggcgataggaacgcaccgcctgactcctggtagctcttgagcatggctcggcggacgtcggggtctgcgtcggcgtagatcttcttgaagaggtcattgaccgcagcgtcgccttcctgctcagccggatgagttggagagagcgcagggggacgtcagccggcctgcagattgaggtcgcactgcgcggtcgagcgacgagaggggacgaacaggctccggctcggccttgtttagttcatcttcggtgatctttgaccagtccttctttggcctcgggccgaacgatgccgacgtcggttcgctcggccgggctgcggccatcgctgcggacgaggaaggcggtcagcacaggcacctgcagcagcggtctcggcggtcgagcgacctctttcaaacaagacgtacgggtggcctcctcctcgccgacgagctggttccacttgagccccgtctcgcgcttgcgaaggacgagctcgaccttgacttttgagacgcggtacgtcgagctctcggggtcgatcgcgtgcgcgagcggtctgatgtcgtgggtcgctcctgggagaatcaccttaatctgcaggaggtagagcgtagcgtccggtcagcgaccagatcttacatgactgcttcggcagttgagcgagcgcgaggtcgggcggagagcatggcctgcctcgaccgggtgaaaggggaaggacgacgcaccgaccgctcgcggaacgagaccgagacgtcggtcgggctcaggttgcggacatagaacgagacggtgtagttgtcgtccgattggaacgtgtcgtgccggggaagctgcgatgtcgaggccatggcgagagggaggtgcgatgatggatggacgtcggagggtcgggcgcggccggtcttgtcgccaaccctcgacagccgtcggctggcctctttacctcagagactctcgcacagagtcgccttacttcggaactgaaagagtcgatccaacgcttgtccgtgcctccgaagagaccgtcgctctcgacgagatctcgttcctaaaggccgaaccggctgctgaccattgtgtccaccaagctgcccgacaccggctcgtgtatactaagcccgaccgacggctcatcgacagcacagatggacggacgcctgttcaaccgcccgagcgcatcatccgcaggaccaggaaagcagaatctccatcgaccaagacggccggcacctgctgttcacatcttcttgtcgtcctcaaagtcgaggtcgtcgtgcggatcgtcgtcgttgaagtaggccggcagagcgtcctcctcatccgcggccatgacgcgagacgagatggcgagcggcagaaactcttcgacccagaagtcggacgtcgtgcccttaagcgggagatgcagcgtgagcgaatactacgagggagaaaggggcgcatcgtgcgaagatcagcgacgtgctcggcaggcgtgatcttgcagtgagagcgccgcaccttgcagccgaggcctccgttggagggacgcgggaagctgggtgacaggatcccttgccggcgcgcacgccggccgccgaggtaaaactcgccgacgatggtgatggtacacgaccaccgacgctcgggctggccgtcgtcgccgagggtgtcgacgagcactttgtcgccataccagacgcgccgctcgttctcaatttcaccaactttgtcgacaaactgccggaccttctgacccgccccgtgtgccagcgtgtcgaccgtcctgatcaggtcgaacgtcagagttgacggtggagggatgcgaagctgcgacgcatcctcagcgttctccacaggcggcgattggacgaccatggtcaaatgaaacggcacgggatggtgcggcggcaggatcggcagagcaggcgcaaccatctgcgggatgcatcaatgtcagcgagtccaaacaaccaaagtgcaaggaagactgagcggccgcacctctatccggatcaggcctttggccgacagcaagccacccatgcggacgtgcttctccgtgaagactgtcctccagcgaggcccctccggtgctggaggcggctgcatcggtaagctaccctcctttccagggggaggaaggatcacttctggaagctctgacgggtcgacagccgtcgggggactgcaagggtcgcaggaaccggtcagcgctagcgctcgccggcagggcgtctggcgtcggtcgggcgacgcacaagtagaggaaaggcttaatgatcttctcgtcgcgggtaatcttggacgaccggatgccgacgactttgatgtagtatgctgtgcgaccgacggcgttgccgactgtgaggccgatgcccagctcgccagcctgcgatcgcgaaccaccttcgaacgacggcggcaggtaagaccgcgttgcctgctggtcggcccatgacggtaggcgaaagctgaacgccatggtgagcaggcctccctcgtcaatgctcgtgtcggacgtcatggatcgaggtgagagcgtccgcttcagcgcgtgcacatgcatgccgtcggccgatgaggtcgaggcccaggacgacgggccgagttgtggcggatcgactggcgagtcggatcgccagaggacctgatcctcggcgagaaggagcgtgtgctgggtacggtagtctggaggcggggagaggatgccctcggcgtcagccgtagcctgattgcgaggtggtcgtctcatcgcacggcggttcgagctcgacgcacccgatccaccggcgtagagcgacatgccctgaccgccgacgtgctggtatgtcgagacctgctcgagagatgaccatctcggcgatcaggcacgagagagacgcaagaggcgaagagcagatgggaggccctgacctgcagtacacggagccggacgacgaccgaatcgatcgccttgcggcccatgccgccgcgcatgcggcctttgcccttgcggtcgccctcaatcccgccggcttcgtcttcgttcagctggaggtggacgacgccggacacggtcgagccggccgtgtagcactggcgctggtcgaattcgacgacgagcggcgggtcctgcggcgaccgcttgagggccgacttgaggcgcgagagcatcgtcagatggtcggcagcggcggcggcaagaagcaaggagattggatggcggggagtaggtcgtctgtaagtagggcggatgaggttgcgatgctgatggttggcgacgagccaaggcatggccggggctgagcgcctcgtcccttcccccgcgcatgcgctcggcgtcggccgcgggcagccggcagcccctttagcactcgtgatcgatccaccgctgaagagagaaagctcccagtcgaagcgcagttgtattcaagcaccatgcgatcgacatcgttcttacggcgccgacggctcctgctcgcgcgcctcatccgcctcggcctcgctgaaccaggtcaggaccttcttgaactcgacattgccgccggtgatgacgacgacgacacggacgacgagctccttctcgcttaccgatttcttcgtctcgcgcgcgacccgggaggcaacattttctttgacgaggtcaagccaaggctcggccgagggctgagcgtgggccgcagcgggcgccgtcggctcgagcatgacggcgagcgcgagcgcacacgagggctcgatgacgagcttcatacctggagtcgatccaagcgggtgtgtgtcagtctgcagtagagctagtgggtaggatgggaagggacggacgctcccagacgagcttcatggcccggatcgaggctttgtcctcggcaaggaggacggcatcaacgctggaggaaagggagacggcaggatcagccgcttgtcgatagcagtcgccgtgctctacaagaggagacgccgggagcttactttctcagaagtgtcggcatcgtcatgcgcccagtcgccgtcagcaggccgtcgcagatcgaggtcgtcgggttgaccgcgccgtgccagacggcttgcgatttgtcgaccgccgagtagaatgtctggtgcaggtcgtttgcgcctgccggttgcggcgatagagagcagcagctcaggtcaacgctaacgacgggaggcgaagagaaggtagtgacaaggtacgcaccggtcggctcggcagcgacgaccttacagttcttccagtagcccttgctcgcaacgctgacgccgctcataaggcctcctccgccggcaggagcgacgacgaagtcaggctcaacgctgtcgccccagatggcgccgatctgacgcgcgcactcgacgattgtcgtgccctggccttggagcacgtcgatgtggtcgtacggcgagataaagtggacaagctcgccttcgctgcggatctgagagaccggcaggtgctgctaatcagacggggcccgctgcctgctagacgtcacccaacgctggacgcaccctctccatctcggcatcgcacgtcgcctgtctcgcccgcgtgtcgggtgcgcactcgatgaccttggcgccatagccgaggacgccggccttcttgacctttgagccagacgagggcatgatgatggtcgcagagatgggccgctcgggcgtcgagaggagctttgccgtcagagcgatctgaagcatgccgtagccgggcgaggaaggagtcagtctcttacaaggcagtaagtgacgcggaaggcaagcgggcgcaccgcttgagcgtggttaccgctgctgtgcgtgatgatggtaagcgggccatagggcggccgtttggccagataccggagcgtcgcgttaagcccgccacgaatcttgaaggctgacggcgtgcagaagagtcagttcgcggctacgtcatagaagcgggcgagcgaaagggaccgacctccgatgcgctgcgaaagcaacggcccaagcgagtgatggttaagaacggggttgcgacggaaggctgaaaattagcgacgcatccttcaagcagatcaaaacctgtgcagccgcagcataattggccaatgaaagaggagcggccgcacctgaagactctccatcttgagcgcaagctcaagccggaccttgcgtccgtcgggcgtcgtcaggccaccgagggcggcggtcgcgcgggcattgagcgtcgagctcgtctgaagcggggttagatgaatgtgctcgctgcgttcggagatggcgtgagtcggtcagtctgatggacaggcgacgatgcgaaggatgacgggccgaccggatgcgagcgtgcgcctgctcgatgccggcgagcgaggggatctcgacaccagccgggtagtcgtacgagggcgttggggcagcagcggcagcggtcatggtgtcgttaggtcgtcgcaggtgagtgtcaggagccagaagacgacggcgagtcagcaagcaggttatagaaacgacggccggagcggagggagcgggccattgcggtaggcatcggcgctggccgcgggcgaggccgacggaaccgacgcgagagcgcagcacctgactcgacgatcgactgacagagatcgcctgcacggccgaacggaggtccgagcgagcgatctccgtcctccgctgtcgcctcgctgagtcagagaaggtcagacgctcactcgacgagaaacgacttggcgaaatggtctagcaaccgttgctaggagccggtcatgtagtgcggccgtgcggcggagaggtaagcaccgctctggcctctgccgttttgtcgcctgtcgctcgctcgcacccgaccgaccgaccgccatcatctcccttcgactaggtgcgtgctctcctgcttcaccctaccatagcacgaccacctccttttgcatgatgatccactagatgacgagtcggattgtaatccctgtccccaccgtggcggagtaagtcgacggaagttgcaaccgaaagaggctgcccgccgagcacgtacacaggttgacgatcacaagaagcacgacagcgagcatcgacgagaggacgacgatgacgcctgggacatactcctcgccgccctcggtaccgaggaggatcgcccaggtaccgagaagcgtgaggattgcatggtaattgtcggccttagattccgacaggcagatggtcgggagagaagagtcagagtgggaagggaagggagggacaagtcagcgcaaggagtcaggttgacaagcgaaaggctgaggccgacgcacctgccggcgaagtccccaccgctgtcgccgatcaaagctgaagacctcgcgcccgatgaagtcgagtacggtcggcttgatccagtagaggccgaacgagaggccgtagtagtaggcaagcgtcgaccagggcttgaagctcgggagggccatgaggagatcggcgaacgacgcctcaaagccgagccagcgggcggcggcgacgtgcaggtagacgaggaccgcgagaatcggcaggacggccaggctcggcggcgcgaggatggtgtcggtcacgaagagggcggccacatcaggagcagcagctgccggaggcggctgactagggctggccgtcatcgggtcttgttcgtgcgccgaggcattggtcgtcgtggcggtcggaagggtcatcgctgccgtctgaagagcggtcgtcagcctcgaattatcaagcggaaggtcgctgccctgacgatctcactgggtgccgagtgacagtggtttgaggacagcaggggacgtcttgtgctggcgagctgtcgctctcgttgcggccaggtgggcgtgtgtcacgcctaggagcgccggagccgaagtcgagcccgcagcagcagcagcagcgcaggcggccgacgacctcgagctgtcgaccggcctgctttcgtcagggacggtcaggactcgcagacccgacttctttgggccaacgacctcttcaggtgtcgccgaccagtgcgcgagggatgtctcttggtcgactgacagctcaaccctctcagggccgatgacgctccgaagccgaaagcgcctgtcgtcgtgcgctcagcccactaacagcatctcacgttgcaccctcccatcagagttcaatggcgcctggctcgccactcgcaactatcaggtcactcgaccatattgtgctcacggtcgcatcgatcgagcagacggtcgccttctatgcccagctcggcatgcgccacgacgtcttcagctcaccctctgcagcacccgacgacagcaagcgccacggcctcctctttggctcgtctaagatcaaccttcatgagcttggccacgagtatgagccgcacgccgccgaccccaaaccagggagtaccgacctgtgtttcatcgtcgaagaagacgttgagctcgtccgtacgcggctcggcctcgctgggttcgacgtcctcgagggcgatcaggtcgttcgtcggtcaggcgccagaggccccatcaaaagcgtctacgtgcgtgacccggacgggaaccttatagagtgcgtgcgccgtctggacgtcagtcgccaggcgaacaagttgttgacggcgggttgctcttcaggctctcgaactacatcgaggcaggctgagtccggccatcgccctcgcgcatctcgcagggcggcagcactcctctcgcccagcctttcgcagtagctaggacaccaaggtataggctggcccacgcccagatcatgccatctcggcatcgccgccctcggccgccgcctcatccgcagggctctcggcgtcaaacacggctgcgcactcccaccggttggcgtacgtcgctgcgatggagatggatcttggtcagcttcggcgagcgctagtgaggcgatctggaggctcacccttccagaggcgggttgtaccgtcgtcggctgacgacgagaggagcgtgcccgtgacgttccactcgagctgagtgatggccgcgctgaaagggcggagcgtgagagggccagattcagcgtccgtgcggtcgtcgactcgaccaggcgagatgtgcagacgcacccatgatcaggcagctcggcgatgcatcggcccgaccactcgccttgagcctgggcactctctgcgccctcgccctcgtcatcctcgtcatcgagccgggtcgggacgacccgccagatccgaatgacgccgtcgcgcgagccagaggcgacgaggtggtagctccggccgcatgagggcgcccaggcgagcgccgtctgtgtgttgggcgacgacgcgtcctttgcggtcgccgttgatgagggcgccgaggaggctggcgaaggcagagtgacgagcaggagaggaggagataatgggttctgaagcgtgaaaatctgtaagaagggagaggcggtcagcaaccgcttaattctcggaaggggtcgtagccaagcgcgagaggcagcggccgtacatgaatggcgcccgatgcatcgagcgagacggcaaagacgaggccccaccagtgctcgcggcaccagctcaacctacggacgcccttgcccgagtgtggcccggcggcgagggcgctcttcgaggcgtcgccctttccgccgttccccagcatcttgccgagctgaccgccgccgctgctgctgctgccctcgcccggctggccgccgccggcgagcagcgtcggcaggttgaccgagacgagcgagaaccagtcgttaagccctccgccggcaggcgagtagatgacgagcgcgccagtcgacgtcaggatcgaaagcaggaggccggccgccgacgacgatggcggagggaacgaaatggcctgaggcgtgccgagcgagggcggcagcgtcgtcgaccagaggagcggcacccggcgcgacgagttgcgcttctctgcggcagttgcaagggcgacgagtcagcaagaaggggcgagcgatgacctcgcgtcgagtcaaccagcaaacgcaccgtcgacgtcctcgcgccagacgcagatgcggcggtcccagccccagctggcacagacgacgccccactcctcgcctgcccaagcgacgccgccgaccggcccgtcgtgggccttccagcgatcgataggcgtgaaagtgccggtcgcgggcgagcggcggaagagggcgagcgtgtggtcggccgaggcggtgagaaggtacgtcgacgagggcgagtaggcgagcgaggtgagaaggtcctggtgcgggagcgagaggagcgacgagagctccatggcgggcgggcgtgctggctgctgatgaaaacggtctaagcctgtgcgacacgaaaggggagagggcgcgacgggcaatggcccggtcgagctcgcggtgagcgccgaaccccgagtttgcctccgagtttgcttccgacgtccctgcgagcccgctccgcctgcctgcctgtcacctgccgctccgccctcatctcgtccctttgaccttctaccctcgatagatctctctactgcttgatcactagagagcagtccgcttcaatcagccgccatgtcccttcacgctcctttggctgcctcgagcccggcgaccgcaacgggcgcggctgttgaacgccgaccggccaaggatgagccgccgcacgcccagtacgccatgacgggcgacacgatcgacgacgacgacgaggccgacctgctcgccgagctcgacgccgtcgaaaacaagatggtccgctgggaccgcgtcttttcctggaaggcttggctccgctggaagcttgtccgtgagtcggccggctcgacccttcctcctcctgtctgcaccgccttggcgccggcagcttctgccgtcaggctgcctccacggtcattgcagctccgtacgactcttctgtcgctctagacgctccgctgcgaagctgccactctcaatcagcctcgctcgaaaacgaggctcggcggccaacttcgctcgcgcctcatcgcgcgcagcacaggcagtcgccgccatatcgcccgttatcgacctgtcccaaacgaaaggactcgggtcacgcctcactgacttaccttctcgccctccttcagcctattacatcatcggtgtagtcatagccgtcctcgcagcgctcctgttcatctaccacaaacagataacgacctggctgaggccggcagccgactggatgaaagagtgcgctctcgcttgccgtctccttcttacgtctctgcccttcatgtgctgaacgtttctgcagacttccggccggattcctcatccctgtggcagttatgactatccagtcgttccccccgctcttcggccaagaggtcagctccgcattttgcgtccctcgccttgttttgagttcgagtacacgactcattcgctgcttctctctgtccagatcgtcgctgtgctctgcggtctcgtctggggtctctggaagggcttcctgattggtgcgagaagacctccggcgcctctcgcgggggcgatggagctgatgcgacctgccatgcggcctccttcgcgacacagtctgtgctggcaccgttcgtcctccttcaggctcatctcgctcggcaggacaccgactgaacagaatttcaacctctttccgcagttcatcggcgaatgcgccaactacgtctgcttcaagtactggttccggagctcggccgagaaggtcgagcgcaacgacattgcctacgcctgtgttcgtcgctcctctcggctccaccaccctggacgtatcgctgatcgtcctcctcgcggaaaacagcttgcccaggccatccgaagcggagggttttgggcaagtccccctcgcttagccaggttcttcggccgccctcgctgaccgctccttctaacttgctcttctcgaaactcattaccagctatgccttgtcgtccgactctcgatcttgccgggccacatgacgactgttgtcttttccacgtgcggcatgggattctgggagtttgccctcggggcatttttctcgctcccgaagcagctcgttaccggttcgtttacctttgttggtctcatccaaccttagattgaccttgacctctctttgcctcccggcctgcagtctatcttggcgtcgcactcgagcagccaaatccagacaagaagaccaaggtcggtcccagcggaaaaaagtacgttctgtgccgttccgcaggctgacactgcactcgcttccttccagatcggcaactattgcgtggttacggtgaccctactcatcacggtcgcctcgctctggtggatctggcacaaggtccgcatccgccagaccagcccgtcctgacacaccttgcgctgaccggccgccttggccctctcgtgttccagatgaagctcgcccggccgacggtcgtccgcgagcgccgtcggcgccagaagctcctcgcaaacggcggatctgacgccatcggcaaagtcgacgccgtcgagatggacggcttgacatttggcgcggaccgggccgagcgaggctggggcgcgagccgtcagtcagtcgaatgggaggtgccgagcgatcggcctggcgtggtgcgtcttccgactgacgcctcccttttcttgctctccactgacaaagttctctcgcacagacctcgcttgacaccggctatgagcgcccgacgctgcagaccccgtccggcccaaacgggctgtacgccgatccctactttacggcaaacccttcggccgctcagccgttcggctaccctgagccaagactgaatgaccatgccgggcgagacctgcaatcgcagcaggcggtcgcgagtgcttcgctcaaccagcgaccggcgacgcaccgtcaggcgacgcaacacggcctcgagccatcagacacgtcgacttaccactcggcacacacctcgcacggcgctgatggcgcccggccgacgctcgacagagccgcgacggctgcctcaaccggtgcgacgtcgatcgcgccgagctaccggtcgaagaccgacctcgccgacccagccgggcaggaacgcacgccggcctactcgtttgtcgccagcagcggccggttctaatgtcgtccgctctctcgccttctctctctgtgtgttgtacgaggcctggaacgatgcaaatgtccctggaggatctggagtgcataagcatcgtcgggtcacacttctcgtcgccagcacgagcgagaggagagcgcgcccgcagcgccttgggctgagactcaacaacagcgacctcgcccatcttgcctccctctgacagccgcctcaagcctctggaccggacccagacaacgattagagcagagggagagcagcagccgctcccagctagcctgccatggcctccgttccggcggacgattacatcgagcggctctcgcgctacatccagagcaactcgtcccgcctcgcagcgcctccgctccgccggccgccgtcctcttcggcgctctggccaggctcgacgtcggccaagccgctcagtctgcgtatcactccgcacaacctctactacctgctcctccgtttcgaagcgatcgggctcgacgtcggtccgctcgacgtccggctcggcgacgatgcgcgccgggccatctcgttcgtcgagccccgccggacccaaggcggtagcggccggtcgcgcgactggagcgagacgggtagcttccggagcatgacgagcgccgtcagtagcctgagtctcggcggctggtgggcgacgagcaaggtcgtggatccaggtgcgtcgagacgaccttcgagatgctccttgacatccgccagcctcttgctcccggacctccggctgacttgctcttgacgctcgcgacagacgcgacgctcaagctcatctactcgtccttcacgaagctgccgtcgctcgtcgtccatgcggctggcctcggcgacgacacgattcaggagatggagagcaccggcccgctcgactgctgcgtgcccctgcgcatcttccgcaacctccagttgtgcgtgctctcgttcaagctgccccccttcagattacgatcgttgacgcctgaggctcactgtgtaggctcgagatccactcgctgcccccggctgccctcctggtgccttcctctcctgtcgtccggtcggtcatcctctgcgacctcgactcgcctacgtgcgacgaggaggctgcatggctcgtcccggccctgttcgcgaagcccagtcaaatggcctcggccgtttgcaacggtacaccacggggaagggttgtccgaacacgtcagccaagcgcgacgaccgacgtgatggcagggatggacgaggaggacgaagagacgtcagacagcgacagctttcagccaccgcctctatcgtcatccgcacttccagcggcggcggccggcctaccgacgctcgcccgcttcgtcaacctctcgcatctcgctcttccccacctctcgctcgtcaccctgccgcgcctgccgctgccctcggtcgtctcgctcgacctctcgcacaacctcctgctggagctcccggccaaccttgtcctactgccaaacctcatctcgctcaacctcgagggcaacatgatccagtcgctgcgcggcgccgaccaggtcctgcccgcgccatcgctcgctagcagcgctgcagccgttcgagggacgccctcaaagcggcttcgcacggcgaccggcctccgggtcctcaacctcgatcagaaccggatcgccaacctgcatggtctcgcggccttgtcgacgctggagcgcctatcgattcgggacaaccggctctctgaatcgcaggagctgcatcggctcactgtcctgccggtgctgaacgacctctacgtctgcccgcagccgttcagcgcgctcccagccgaggaaggctggcgcgtccggctctgggaagcctttgcgcgtgagggtcgggccgagctcgactgcgccaaaattgatggcgagggcgtcggctggagcgagcggcgcaagatgcgcgtctcgttcccggcggtctcgcacgccgcgggctcgtcgtcgaacggccgacccgtgtccaaaccgaggagtccggacgtcgtcgctgtcggtgcaaggcgggcgctctctcctgcacgctctgctacggataagcagcccctccagtttgacgtctttgcctcgacgccagtcgcatcatcgcaagccggtgcgcgatcgccgcagccatcatccttccccgccggccttgcgccgcccaaaactggcatgacgccatcactaacacccaagcggcggaagcagcggatcgtcaacctcgacgggtcggtcgaggctatgcagcgaggtgggccggtcagcggcgatgacagcgacgtctcagccgtcgtcaagcgctcaccccgctcgccggcgaagccaaccgcctctggctcgggacgcccatcgagcccggcaaccttgcgcgttccaacaacgcactcgtcgctgaagctgccgtcgccgtcaaagtcgtcgcatgcccggcgtgcgctctcgtcgtcggtctacgacccggctggccagggaccgtcgtcgccaccgggcagctcggcggcagagtcgggcgatgagttccggcgcaagctcgaagggctccggagcgacgtcggcgactcgtggctccgcgtcttgtcggctggtgggactggcaacgcaggaggcagcgggtctgagagccctggccatggacaagacgagcctgaggacgacgagccgacggtcgagcaggaggcgccggtcgaggaggcgccggcgccggcgccggtgccgacactagacgagccggaagatgtcgtcgttgcagacgcccccgaggtcgttcaggtcgtcaagaagccggccaagaagaagaaggccaagggcaacggcaagaagaagagctgagcgagagcttccccggtccttcccgcccgccacctgcccgctcgtctgactagactgaccgccatcgtagacgccttgatgcatgactccttgttgaccccaagcttttcaggcagcgcacgaggtggagtggcaagcatgggggcataggacggcaagatcggggacgggtcgtggcaacagatgggggcgggacgagactacagtggggccttgaaggggtcaggcgtcttcaagggatcggcgacgagtgttctggacaaggcggctggagctgcggatatgagactgcaggcgtgcgtacaagggagcataggggtgggacacggcaggcaaagggtcagacgagtcaaccggcctggacgacctcgatgaactggccgagagcccagcgggtgagcaggaccggccagaaaaaggatttgacgccgaccgagacggccgcgctggccaccgcgagcatcgagcggacgagcaggccggcgaccgccaatgggccagacgaggccttctctggctgcggcggcggcggcgaccatgacggtggcaagggcgagacacgtgaggctacagccggtgccgggccgtcctctcccgcaacctgccgcgtgcggggtgtgataagcccggcagcagcgacggctggcgagtagatgtagctggccttgccgcccgtgcctgtacctgcgagctgccctcggtcgctgccggacgagagccgaagaagctggaggacccactggccgaaagcgtagccttgccgctcgcgctcatcctcgacctcctcgcgcagaccgagcaggccgcgctgcacgagctcgagccgctcgccgagcgtcagccgaccgagttctgcccggcgttcgacccgcttgacgtgccggccgaggtcgacgagtccgcccggtgcggcgtagacgtcttcgcggagggttgagacctcggttcgcgaggccgcttcgtgccggagcgtcttgacctcgcgctcgagcccgcggagcttgcgccgtaggagctcggcctcgtcgtgcttgggtgccgagacggccgctttgaggtgggccgtccggtcgcggaggaggctgacgacgtttgagacgggcttgatgagcgccgcgaggaggaagagccggatcgacgagggcgagaggtatgacgggatgtaggtgagcgtcgagcgcgtcagggtcaggaggaaggcgcccaagacgggcgaggcgaccgtcagggcaaggtagaagacgtggtccttggcgagcggcgacgacgcgccgtcggcgtcgaggagcgagtgatggagcgaggcatggtagagctcccagggagctgaggaaggcgaggagaacaagtcagactcgaagccatactcagcgcctctgtgttggggggaaactcactcttgatgagccagtaaacccagtagccgacaaggccgaggacgagcaggtcgcgccaggcgtcgccccggccgacgaccgcgccggcgatgaccggcaggacgacgaaaaggagcggcaggtagtgccacgtcccgagctcggcctcgtgccggcgcgagctgctcccaccaccaccgttgccagacgatgtcgagccagaggcgatggaagcgccgtcgttgtcgtcgtcgtcggtcgaggacgcgtacgcatcatccggtccgggttcgtcatccgcgccgagccgccggtacgatggcggcgtacgcgtcgtcgtcccaccggaggagctcgagcctcctgggcggatcgaggcgttgctgtcgccgccattgcgcctgcctgtcctcgtcttagtcgttggccggccctgctgctgctgccgggttgacgaggcatgcggggtggcgccgctgctcgactcgccgccggaaataccgccgccgccgtcgtcgtcgtccgaccgggctcccagggctgtagtctgccggcggtggacgtcgctctgcgcggcgagagcgtgagctgaggaagatgccgtcgagccgtcctctcggcggcgggtctgaaagctgcgtcgccaaaggacgaagcaaggtgttcagcacgcgacctgctggtggggaggagcaccaacgatccctgcgcgccgcctcggccatcggccgaggagcctctcgcacgcaggcaagagggagttcggaacgcacgccttcatgcggagactaagggctagctgcttgtctgtcttgtgctgtcgattctggagcccttctgctggcgggtgttgctccgggcgaccgttgaggggtcggcagcgtcagcgcgagagatggtcgcctcgtgctgccgaccgacagccactccctggaccctggcaagaccgttcaacaacaagcagacagcagcgtcgcaataatgaacaccatccaggtccgggccggtcgcaccgcatgctctctagcgacctttgtggctgatctgacggcgcgcgctaccgacagagctcgttctgggctgtccgcgactacctggctccggtacgtccctccggcgtcgccgcctcactgttcatgttagccagactctagcaggatgctgacagctccaccaatgcgacccggctgcaggtcctgaaggagagcaaatttaaggagcatggccggatcacacccggtgcgtccgtccggtcggctagtgggttgagcgagcggcgctcgggcggaggaatggtcggctcgagcagacgccaggccgcctctggatcggctttcatgcttggctgggtgacctcatcggattgcagtgtaacggcgtccttagagcggtcggccctcagggttgactggaggccgctcggccggcaaccaggaaaccatgcggcccttcgcgcgcagtctccctttgacggcggtcctccgatgctgacctgctgcacccctgcggtctgcctctgtcttcagaggagttcgtcgctgccggcgagtttctgacgtacaagtttcccgtctggtcctggtgcgtctctcgcggttgcttgccgcctgcttcctgcttgccgcagaccgctgacgctcggcgacggccggtcggtcgcaggcagcaaggcgacccgtcaaaggttcgcgacttcctgccggccgacaagcagtacctcatcacgcgcaacgtgccttgtcttcgaagggctagaaacctcgactatgccggcctggacgaggtaggtcctgaagccccttcctcgatgttgctcgtccttccggctgaccgagttgaaaccttgccgcaggacaccgagcgcatggtgtcgatgctcgacgaggccgaggaggcggcgcctggcgcttcaaaagccaacggtgaggaagactgggttgagacgcactcgtcgacccacccttccgcttcctctgcctcgggtgggacaggcgccgacggccggccggccgagattcccgagatcccagacctcgagccgtacccccctcctgcggccgccgagcgctcgccccccgcccactcggccgtcccggacgaatcgtcgctcgcgagcctgacgctcgacgaccagagcgtgcacgctgtcgtcggcggcgacgacgagattccagacttggacgacatcccggacatggacgacgagatggacggctttggcggtgggctgatggaggaggaggatgaggccacggctcggccggcagcagcggcttctcacgaggacgagagcaaccttcttgccgtccggacgtacgacgttatgatcacgtgcgtccctccgtgcacaacaggctgcagggcttgggctgacctccgccgtgcgtcctgctagatacgacaagtactaccagacgcctcgagtctggctcctcggctactcgcccgcccgtgcgcctctcagccaggccgagacgtttgaggacatcccggccgaccacgcccacaagacagtcacgtatgaggtcttcccgtgcgtagcggccgtcggcccgctcttgctcgcacttgtcggagaaggactgacgtgaacctttgattggactgactaggcactcgggcctgccgatggcctcggttcatccgtgcaagcacgcctcagtcatgaagaaggtgatcgagcgcatgggggccgccgccgccgccgagcagcagcgtgcgctcggaacgacctcatcggtcggcgcgtcttcggacgccggcagcaagtcgggcaagcgccgctggctcggcctgcgcaagtcgagcgcggttggagggaaggatgaggtaaaggacgagtcagaggcggccgacgaggagggcctccaggttgactactaccttgtcatcgtgcgtctcctgtgtgtatttcctccgtttcttttcgctgactgtcctgctttcgacctcgcagttcctcaagttcatcgctagcatcgtgccgacgatcgaggtcgactcaacgaccgccttctgaggcagccgtctgtcgcgccaacgtcgatcggctcactccttcttctctcatcccaccgctgcctcgaccgtactccgtgtggcgcctctcaacggaatgcacgctgccctccttgcacaactcattttcgtcttccttgcctctgcctctctaatgaccacccaaactgctgcggcgccgcatcgaaaagcagctgccttccgcagacctgcgaatgctcgcatcggccagctgcacttgagatctcgttcaaggcctgaagcattcgatgcatcgcgctcgagtaggccgaccaccgaccgagcgcctgagactgccgctttggccggtcgggctataaaggcactctggcgaaatggcccgctgaccgaattgccgtcgctgaccagacttgcagccggtcatttgcggcgaccggcgcgagccttcattgcttcttccactgcctccggccaccaaccaacgtccggcttcggcgcagcctccgctaccgacggttgcgtcgaccgcagacggtctgtcaaagactggcagaagcgggcgagtgccggtcttggcttgaagtctcgacgttcgacccttaactcatcgtcgagttgccgcctgctaccaaggaaactctaccggcacgagacggtccttacttgcgatagagcaagtagagctctgtcggtcgagactctcatctggctgcccgctgtctcgagagccgtaccaacctttcggtacggcgcttcatcttgttgaagagcgccagttagcagcacgaagtgccttcgcgcgcattgtcgcactcgtcagggcttcggaacgcccatcagtcgcgcctctcaaagcttaatatggtttggtctagacctgtgcggccggatgtgccgacccgtgccgctcatcggccctttcaccagcgagggacggcggccgagggcgtgttccagcgtgactttcgctgcgtgacttttgcgcgcgtccgctcagccgagacaacgccgccgcctgctgttgagcgacgaacgacgacccagaaccggcctgtccccagcaagctcacgcgacgcgaagccggaacgcccactttgcgcatcgcacgctgacaatcgcccgcagccggcctctgacgccctctgtctgtctgtctgacccgacgcccgtgccgagaaccgccggccctcgcacctcttctcgccacgccgacccagtctcgcttgcaccacaagctcgaactcaatacctctctgctcgtctttgagatcgctagcaagcccttcaagaaggcggctcatctcaggctgactctcttctcttttcccctcacccctccgacaccttccttcagccctttctctcccagccctcccgcgtcttcctggcgaagactcgcgcgaggacaacctcaagactcccaagccctcgacacccgccatccttcaagacctccgccttccgcccacctcccttccttcccttcctcctcccggatcttccccatctcttcgccatgcgtctttctaccctagcggtcggagccgtggccgtcacctcggtcgccgctgctgagcagggcgagctttcgtcagtctcgctctcgcctgcccgaccatctctcgccgtgctgaccttaatgccatctcatccttccttctctgctaacagccgctggcagcagagccgctaccacctcgaggccgccaacggccagcaccccgaggagaagcgccaaatcttaggcaacctgctctgtgcgctcggcagcatcgtcatcggcggtgtctgcatgacgcccgcccaggcctcgtcggtctcggttcagtcggcccagtcgacggcctcggttgcctcggtctcgcgcctggccaaccaggcgacggcgacgggcaaccttaacctcggcctccagacgtttgccggcgccattggtggtctcgccgccccagtcaccgccgttactggcggcttcctcgtcaacggccagacggtcccgaccctgctcgccgctcttaccatctcgtgcgacaggcagcggacgatctgtaaggacaacgtctttgtcgtcctcgacgcgacctgcgacacccagcacacggcctgcattgccgccgccaacacgatcaacaacgcccagggtgccgcgtctgctgcttcggtcgccgccgctcaggccaccctgtcggccgcctcggtcgcctcggccgcctcgcttgccaacgtcgcccaagctgccgcctcggttgcctcggttgcttcggtcgcctcgctcgcctcgattgctaacgccggccaggccgccgcctcgctcgcttcggttgcgtctgcttcggttgcctcggtcgccaacatccagggcgcggcttcgctcgcctcggtcgcttcggcctcggctgcctccctgttaaacgttcaggccgtcgcctcgcgtgcttccatcgcttccgtctcggccgcctctgcgctgaacgcccagggtgctgcttcggtcgcttcggtcgccgctgcctcggtcgctgccgcctcgaacgccgccattgctgctgcctcggtcgcgtccgcctcggctgcctcgctcgtcaatgtccaggcggctgcctcgctggcttcggttgcctcggtctcggccgcgtcgctcctcagcgtccagggcgttcagtcggctgcttccgtcgcccaggtgtgagtcttctcaccttcgatgttgtctcaatcaaggtcacatggctcaccccctttgctccgccatctcgcagctcggccgccgccgcgtccatcgcttcggtctcgcgcgcgtcgatcgctgcctttgcccagccgaccggcactgtcctgctcggccttcaaaccttcaccggtacccttggtggtctcccctcgcgggtcactgagacgctcactggatccttcatcgctggcctcaacttgcctacgacgagcctcctgacggcgctcacgcagtcatgccaggaccagcgcaacctctgcaacctcaacttcttcatcggtaacaccgactgcaccaaccagttcaacaactgcgtcgccgtcgccaactcgcaggttgccgcgctctcgaccgcctcggttgcctcgatgtgagtcggccctctttgttcatgccttcttgattagatgctgacccgaaccgcatccttctcacccttcacaggtcgctcgcaggtgtcgccgccgctagcaagtcgctcgcctccgtcgccgccgccagcagcctggccgccaacgctgccgcctcgattgcctcgatctcggccgtctcggtctcggtcaaccggccgacggcttctggcatcaccggcctcggccttcaggacttcaccggctcgatcggtggcctcgctacccccgtcttggccaccgtcggcggtctctacacagccggcgtccacctcccggtcaacagcctgctcgaggccctgacgctgtcctgccaggaccagcggctcgtctgccaggctcagtttgtcttcatctcggccgcccagtgcacggaccagtataaccggtgcattgcccaggctcagggctcggcctcgagtgcatcccaggttgccgccgcgtcgcttctcaacctgcaggctgcccagtcggtcgcctcggttgctgctgcctcggccgcgtcgctcctgaacatccaggccgtccagtcgcaggcttcggttgctgccgccagcgctgcctcgcttttgaacgtccaggccgcccgtcacctgctcagcatgcccccctcgaacaaggagctttacgacccggccaaggttctccaggaccccgagttccgcatcatcaactcgcccgacgagctgcccaaggagaaggacgctaaccttgcctgtcagtcgcgatggctcgtccgaggcgcgagctcgagctgacggctgagacgcccctcccctctcccctcaggcttctacaaccctgctcacgaggtcggtctgcttcccgaggtgcccggttccgacccacaggctgatctactttgacctctacagtgccatctcgtcgtcaagccgaagcccaaggtcagccccccctccgtcccatcggcctggccgttcggcctcctccggctcgtcgcgtcgacgccgggtccttgcccctttcgtatatcacaccgaccgaccggcgtcgcttacgctctctctctgcttcttccctccctcgcaggccggcccgggacaggtcgtcgtccacgtcaaggcgactggcatctgcggttcggacgtccacttttggaagcacggccggatcggcgcgaccatgattgtcgagagcgagtgcggcggcggacacgagagcgcgggcgaggttgtcgagggtgagcgcctttcttcaactcatctggcctctgactttttgctgacatctcgtgctctgctgattgcagtcggagagggcgtctcgcagtggaagatcggagaccgtgtcgccatcgaggccggagttccctgcggcgactgcgagttctgccggtacgtacccagcctacgagctctagctctccttggcgcgcacgagactgatatcgtgctcctccacagcatcggccgctacaacgcctgcccggaagttgtcttcttctcgacgccccctttccatggaaccctcactcgcttgtgcgtgccctctcctcccgctgctcaacaatgtccgcgacctgaccagccctcccccctcccgctgcagccacctccaccctgccgcctggctccaccgtctgcccgagtccatcacctgggaggagggcgcgctcctcgagcctctggccgtctctcttgccggcatcgagcgttcgggcctccagctcggcgaccccgtcgtcatctgcggtgccggtgcgtttgacctgtgcgcttgagacctgctgcaccgtgggcttatgctgacactttgcccttcaggccccatcggtctcgtctcgctcgcggctgcccacgcggccggcgccaccccgatcgtcatcaccgagtgcgcttcccttctcggatgctcgtcgccctcaagatgctgatacggaccctaccttctgccatcgttcgacagcattgcccagtcgcggctcgactttgccaagtcgctcgtcccttcggtcaagacggtcctgattgagcgcggcatggaccaccttgccgcctcgcaggcgatcaagaaggccgctggcttggaccttaaggtcgcgctcgagtgcaccggcgtccagagctcggtctggagcgccatcttttcgctccaattcggcggcaagtgcttcatcatgtgcgtctctcttgcgcgtttcttcgtctgtcggatcccgagctgaccccttgccgttacttcgcgtcgctcagcggcgtcggtcgcgaggtccaggagatgccgttcatgcacctgagcgcccacgagattgacgtccagttccagtaccggtcggttcacatctgcttcttcatttacggtgacccgcagctgacctgtcgaccaaactgcttccctccagctactgcaaccagtacccgaaagccatccggctcgtcggctctggcctgattgacctcaaaaccctcgtcacggtgtgtcctttgtgcaatcaaggccgagtcaccgtgcgccccatgctgatcatgcccttcctttcgcagcaccgctacccgctcgaggaggccaccaaggcctttgagacggcggccgaccccttctcgggtgcaatcaagtgccagattctcgactaaggacgccgcgcgcacctctcctttctccttctgtactgaggctcgagggcctctcggggacagctttccgggcctggctgagcggtggatcgccatggcccgtctcctgtaataatgcctgctgcaacctctctcgtcgtggacgtcgtcgtcgttgggcacatgcaatcatcgctcgccgttcttctcggcgagccggccgaccaggttgccgacggggccggccatgcctccctgggccttgtagctctcgaggaagttcttgatgaggccgtagtcgacctggtcgtcagcgtccatttggtcgacgtcctcgtcgtccgagcctacatcgccccccgccgcgagcgccgcccggagctcggcgtccatctgcagcagtgcatcgtccgggtcgaggtcgcccagaccgtcgtccgagccgtcatcctccgagtcgtagactggtgtcgaaagcggcggcttggcggtcgagccgaagagcgaggctcgctcgcgcgagctcgaggcaagaggcgcatttgacggcgccgccttcgccggcttcgaggccgcagccgatacaggggccgagggctttgacggcttcggctttgacgcaggcgtcgccttgaccttgctagccggcggaggcgctgcggctgctgcgttggcggccttggtccgcgcgagatgctcgtccatggcggccatgacggcgtcaaacgagttgagattcggatcgggcacggcgccctctggaatctcgcgcggcttttctcgccgcgtccgcatcggcagtggctcatccggctcgggcccgggcatgaacatcggcgcgttggaaaagtcgggcgcgtcggtcgctgtctgggcgagcggcggcaggtccgaaaagctgacgcccttcgccttttccttcccctttgaggacgtggctgggacgggcggcggcttcgaggtcggagccggagctgccgcaggcacaggtgcagaggagacggtcgcagccttggccgtctttgccgtcgacgacgaggctaccgacttgctagacagggatgccgactcgagaccgtcatccgaggctaaagctgccggcttcggtttcgaggctttggcttgaggaacgaaggctgcaaaaggggtcacgagcgacgcagaagtcagcgagtcaccttccagacgcatgccagtcgagccgagcacgcacctccgcgctgctgccgctcgccgacaatcttctgccacatctgctcgtcgaggccgagggcctcgcgcgcaaacttgatgaactcgctctcctcctcgcccatgtcgacctcagcctcctcggcctcttcgacgaccatcgacctgtcgtcctcctcatctgcctcgagcccgtcgcgggccatcgccgctttaagtgcgcccgacatgccgccgctcgcgccaatctcctggccgccgtcttcgccgctagaggactcgtcgtccgagtcgacgccgtcgtagctgtccttctcgagcaacggtcgccggatcttgttggccggccgggccttggcgtaggcggcatcgagctcgccgagcgcgtgcagcttagcctgccggtcaatctcgtcgcgccgccgctgagcatcgtcgacgccgaaagatgaggccgtcgcaggcgcggcggtcgattcgcttgcactcgttgctgaagactcgtcacctttggaggtcaaagctgttggcgcaagttgcgtcgaggcaccccactgcccgggctcgagcgacttgacgagcgaggccatccgtgccgcacgttgctcctcggacaaggcggccggcgtgtcgtcgccatccgttgaagcctggtcgtcaacatcggccatcatgtcggcgtcgagcgcagcatcgtcgccgttgtccgagtcgggcccgtcatcgtccatcagttcgctggagagagcgcttgaagggtcagtgccgctctcagaccgtggccgacggctttaggccactcactcgtcaaagacggcaccctcgagttcgccctggccgccgataaacttgccgacccgctcggccagcttgccaagtccaccgtcgtcctcattagcggccgcctcgtcctcgtccatctcgtcatcgggcaagctgaggtcgaggcccgactcgccgcccgccttggccgtcgatggagccgtgcctgcccgctccgtcatcagtgcatcgagcgaggaggcgtcaatctggatccacgaagcatctgagtcgggctgcttcggctcgagttcggccgcagatggtccatctctagcgagggcggcctgaaaaagggttgagaacgtcggccgctgagtcctgagagcgagaggggtgtgaatcgggaagtcagtcacaggatcactcttgtgaagttgcactccctgccacgcacgagtctgattcgacccgcagcttgacccaggcctgggcggcctcctcttctcgcgccttccaccgctgggagccggcgatctcgccctcgccaaaccagcctgcgcggcgaagtgtgtcgaggtacttcttgaactccgggtcgggttggagtgacgacaaacgggcggcggcctggtgcagacacaaagcagagatcagctacaatagagtctggcgatggcaggacgtggcgacgtaccgagccggcagatgcgtcgagctctgggtgttcgagtggcctggccttgctctcgctgacgaggatctcaaacccaacggcctgtgagagtgagacacgccagcagtcagccagcatactcggacgtggaagtccagtcggctttgagactgaccaccttgacgccgcgcgtacgctcagcgccctccgcactagcctcgccaatccttgacgcccactcgggcccgaaggcctttgaagggaagaactcttgtccctcgagctgagcaaaggcgacccgcgtcagctgaacctgggtccgcgtcgtgttgtcgggcgtcggcgcaaaggtcgtcatcttggcgacgcgccgcagctgcgaaggatcgcgtgtataaaaggcttcgactgccttctggatgagatccgaccgccgagcgagcccgagcgcaatcggtgtcggcaggtagagcgtcgtgcggtgctggtggtcgggcaggtctttagggtagctgcgcgcgacaagggtcaacgttgagcgaaggtgaatacgctaggtcagcacgccacaaagccgatacgcccggtcgttcagcccggattgatgagcataggcgtcaagaggatccgactcacccggcaatgcgctcccagacgggctgctcgacatcgacgttgcgccacttgccgccgctggtgcgtacctcgtgtacgcccttccactcttcgagccagccatcggccgagccctcatcgttgtcgccatcgtcaagcgtcaaccgccgttcgtgcttggccggtcgagtcgctgccggggacgagacagacagcggcagcaggtggagctcgcctctggcgatgaacagccggttctctgagttctggggcgagacccagtcgggcaggacggcggccgcctcgatcagaagaaagtcgccgtcggcgtcgtagactctgagggcatagtgagagacgctcgtcagcatggcacgggcagcaagtaggcgatcccttgggacgtacgagccgacgacgtcctggaagcgccgggtgagctcacggacgagccagacaccgacccactcgtcttcgatgctctctccgacgcgcatgccgccccggatcacccattgaggctcggcgcccttgggcaggctccggagtccttcgaccttgagctcgagcgggtcgcggtgccagatccagtcgccaggcaggagctcgtcgacggccgagcggagctgggcggcgagcgcgagcgtcgccgggcgtgaggctgcgatcgtcggctcggggtagagcgacaggtgcagcgcatctgccgggatcgacggcgtcgtgtaggcctgcgacatgactgccggctgctgctcagaagaagtggggaaaggaggtgaagcgaaggtggccgtctgcaggcaccgtcaccggcgcaggcggctgacgctcttgggtcgagccggcgggcagccagctcagctcctcctcacctccatccagccctacgacccgcctcttctccttgcagcttcaggaagcctaccttccagacttcgcatctttcagcgcatcccttcatcccggcccatgtctctcacgcctccgccggccgcccggctcgccgccctcgctcggctgaggtcgaccgtcctccagctgccgtacaacccgctcggtctccggaccggcctgcactacctgaccaagcccctgcgagggcccgaggtctcagcctggtacccgctccggctcgacgatcgggtgacgcgctcggtcctcaacctgccgaaggagtggaagaatgagcgctggtcactctggaacgaggcgcgcgagcgtcgtctcgcaaagggcaaggtgcctgtcaagaagggtcagtctgctctcctctgtctagctatcctccctgtcgtctcagacaggagacggggagggcgaggcgggccgtgttggagggatttaaggctgaccgcgacccgacctactcccctcgcctgcttcacatccacgcctcctgcccgacgccgcaactccttgacggcctgtcaccctctgtcgctaccttgccggacgacctccaggccacggaaagaaggccgccctgcgtacaaagcgtggatgaattgccggccggcgaccgatctcatgaagccctccttgcacgacgcgttacagaaccggacctctaagggtaggcgcttgacctcggccgattgaaggcggctggtcagatggccggcgagggcgggaaggccatcgtcagctgcaggccctggagaaggcagcgttctgggaccattgcgaccctggcaggcgccgagtgcgagaggatcaacgctgacactccacttggggcacagctcaggcaacaggtggtacggtctaaggaaggtcattaagaggggcgaggcatcggaagcgcaagaggaaagaaggcgaagagaagcaagcgaacaggggctcgagtctggcagtgacaaaggacaggcgagaagggaaagggcgagcaagagtgtgagaagggaggaaagggcatgcgttgacgatcaaggctggcaagcggtctcgaaggcacgttccagatcaagagagcgattgcgagccggcagcagtgcaggtcaaggcccgtgcaagagcgagacgaagcgctggcactacggctgggtgtgacccgtggcccgcctcactggtcccagtaagagaggatcttctggagcttcgacttgggcttctggttctctgcaaggtgctcgcccgtcggctcgccggacgtgtccttgccgtcgtacatgttctgggagagacaaaggcgtcaaaggccggaagtcagtcatgagacccggggagcgccttctcccccctggaccgacctgcgcggaaccgagcaggtagttctgctggaacatggctgccacgaccggaataaaactcagagcgagcgccccggcccagagagggtacacggtcttcctgaatgggcagtagaaggagagggggttagggaattcaacagaagagagaggcgctgcgggcgagagacgaactcgtaggccaggatggcgccctggcgcgtggccgagtcgaacggcagagccttgatgagggtgatgtctggcaagtgatgaaggcagaggggctgtcagaggtctcgaaggggtaagagggagaaaaggaaggaggacgaaccgctaaagtaggaggcgacctccgtgtcgttcgccgagagggggatgaactcgcgcaggttgccgggcatccggttgttccagacggcagcggagatggcgctaccgatcgagactccgatctgggtccagagcgacaggagcgagatggcaagtgcgacatcctggtgcggaaccgacgcctgcgacgcgacctgggaggctacgaccgagaatgagccgccgataccaatgaaaacctgggagatgacgagacgggccgtgtcgtggacaccctgtcgccgagcgaggtcgaaaaaaggggaggcgcttcagtatccacaggcctttgccagtctggtcgggtgcgacgcacggaacggtcgaccagcaggcccataccgacgactttgagcgcgaggccctgcaaacagcgagctcagagaggtcagcagatgcggtagaccgaggagaagagggatgacgaacgccgatctgcatgagcttgtaccgccgcgtccacttcatgatgaggccggcgacgactcccccgccgcaaaggcccatggtcaaagtatttgaatagtacgtcatctcgcgtggcgtgaagtcggttacgatgagaacgtatgaagtcaagtaagtggatagcatgtctttggtaggggagggtcagttggagtgcaagtggaggaggagcggaaggcgaagactcacagccggcaacctgatgaatggggtatgtcgatcgatcagctttctggttcgacgctgagagacggcgaaaagagccgggagcgtaccatgtagactggaggggggaaaaagatgaagggaagcggtcgtcagcggccagacgaaagggcgaaacggatgctgcgcgcagcactcactgaagtcgatgatgactgcgacgatgaagagaagaagagagcagcggtgagcggtctacagtgcaaaaggtggttcaaaggcactgaggacgcactggccatgacaaacgtccggttcttgaggagacggagcggcgcggtcgggaagcgagcaaagtagcgctcgtagccgacgtaggcgatgaggagaatgcaaccgacggcgagcatcgcaataagagatggattgctgtagcctccagcggcgccggacgagagcgcaaaggggagcagaagctgaggtgcgagggcgaaaggtcagcttaaagcaggcggagaaaggcgtacggagctcaccagcgcccagccgaatcccatgagaatcagtccgaagcaatcgagttcatggaaaacgttccaaaagcgcgtcatgaagggcgccttctcgaccgggatatcgtaggcggggaggtggccggcgttttcctcggtgccgaggtcagcgccatgtgcctcggcgtgctccttcgcgcgccggcgggcggccgacgacgagtcgatgttgagaacgccctccttcttggcccggcgttcgaggtagatcatcaggagggccgcgggacagatgacggcagggagcaggatggcgtacatctgtgacaattgaatagaggcggtcagcttgggcggtgcttgttaactgacggcaatggccactcacgccgtagccccagcgccagttgcccgtgttgataaagtactcggcgatctcggcggtgaaccagggctgcgagacagtggcaagtcagccgttcgctcgttcttctgagtcaaggactcagggtttacggtaatgatgtacggcgaggaaataatgccgaaggcgaggccacgcagctgcgggtccagaaagagggtcgtcagctttggccgtcgctcgagcgacgggtcgcgatcggccgtacgttcaacggcacaaggtcggctgcgagaatggtgctcatgaggtcgaggccagacgatccgaccgacactgcaactgaaccaacgatataagtcgcgagcgtgggactctgtgcgcagaaagacgagtcagtgctgagcagtgctcggttgcgaccctcaggccgccactcaccttaaggatcatcacatggccgacagcgtaggccacagcgatgccaaggtagaggtagctccgcgcaaaaacgtctgagagcttggcgatgactgcaaaggcgaggtgaggtcaggcagggaagcaaagacggagaggtagggcacgtacagggcttggagacggcgctgatgatcgccgtcgcgatgccgagcgtcgcgattccggacgagtgggaggcgaacgaagacgtcgcataaatcgtgtagagataagtcgtgctcgaagccctgttttgcgccgtgtcagtctttttcttcgctacgagcgttgttgggcggggcttacatgctgtacaccttgggaagaaagaggagaagggaaggtcagccagggggtcgaatcaagcgcgggccggccggcgtgccgagcaggacgcctggacgtacaaagtacatcaggacaacgcaggcgccgatgatgtagagctgacggcggccgctcttggtgttctttgcccgggcgacagcctcgatgcggaggacaccagcagtcttcggcacctcgtcggcctgcgcgtagaaggcggggccgtggtggcccttggcggcgagctcctcagcgtccgtcgacgagtgctccgagtgcttctcatgctcctcgtccaagtgctggcggctggcaggggtgatggcgtccgacatcttgggagggagagcgggtggtgggagtagaggggaagacaaggggacggagaaaaagtcggtcagcttcgaccatcgcatctgatataattttctgcgtgtggggcctatcgtccctgccatgctccggttgacctcgaccgaccctagcaagaggtcaatgtaggtcggcaaaggccccgaggttggcgagcgctgcagcagcccctttgcagccctcagacgcgctcgagctgccccagcccctgcgcgcaaacagaacgacgacgtacatcttcaccctcaaggaaggaggagcgttaggaccggaactgcgagctacgtcttgcgagcgaggggcaagggcgtggtggagccatgcagcaggagtgccggtcggtcggtcggcgtttggaagcgaggaagattggaggagggcaggaggcgccggtcactccggtaaagcctccgatgttctcggatccgctatctgatccgcgccgcagctgaggaaggagtgcgactgaaataggtatttgctcgcgctggcgcggggagctcgtgctgcagggacgggcatcttagccggctgccctctgcgcgtgccaacgccgacctcctcctctgacctcgcccgcggctcgtacggcacaaggtcccgccgagctgcgtcgcgacgtcgtcggcgccgtccagcgagagatcggccgaagcccatcatcccttacagatatccagtcatgggccaccctttcctcgtgcggtgggctgctggtctcgactaaaacggcgtgacatggtcgcctggctgtctcttgcgacgcggcatctgcatctggcgcggctgtctgcagcctcgccccctgccgacagctccgtcgctatatgccgcatgagaatggccgggctcggccctttgaggtcgtcgctaccagaagctaggtgggataaggccgagaggatctctgccggtgttggagatggatgctcgggtctgcgaaaggttgaaagctccgcgcgagcgtcatctactcctcggtggacatgatgatcttcccaaaaaaggtggacgtcattgctgtcggcgtcttggctccctgcgcgcaatgtgagcgagcgaacgcgcgtcggcttccgcttggttcatgtagaggcttgaacgctcgtttttttaggcgcctgatggcattgccgagacaccgatgggcatctgcctgagtgaaatcagttgcacactcggcggcggtaggtgcaccgtcaggtctcttaaaagcgtcgtcgttggccggtacagcaggacgccttcagcgtgctgcaacctcagtggccgctcgactgcaggttgagtgaagagcaggtcgagcgcaaccgttcccacagccgcggacgtcctcctcttgctgatgagtcgccgctcgttggtgacgatgagtccctcttggctgatcgttgacgggccttcgacgggcgccgaacgaggctctcgaccaacctcggctggtccgagcaggtcggtgtgaggctggatgagcgcggtcatcagcccggacatgctttggcaccaggaagaagatcgcactcttcggtccaggtgcagagtgtcgcatgatgagcgcgcgggccgggtcgtgactggtcgcgaggatcgagccatcgtgctcgaccgaggggggtcagcgcagagagctaggccagtcacgagcctgtccaagtcagcctcccaacgaccatgagctccctcctccttctttcccgcagtgttgaccctctttgctttggccagctgggtcgcttgctactggccgttcgcaggcaggccgtcgggtgaggcgtcgagatgtcgggcggaaggaaacctctcaagcccccatcggccctgccaaatggcatttagcgggcaggccttcccaggccggcacctcgaggcgccttctctcctttcttcttcaacgactcgctctccttctctcccttctctcctttcacttttaagcttaataaaaatgggtggcggaaacgtgcgtccttgactcctggacgacttgctcctccgccacctgcgttgcgttcgaggctgacccctgcctgccgccacctgcccctcttgcttcctcttccctcaacctcctcgtcttgctgcggctctcgtgtttattagggcatgaagtctgctatggctcgggacaaggccgccaagaaggccggaacgaacaagggctcggagcaggccgtgcgtccgttccttgctggctagcgttcagcccggagcgacaagcgtcgcctcgcctctgcgcacctcggctgaccagcttgtgcttcctcctatccagtccaacaaggccgctcagacgatccagtgcaccgtctgcaagcagaccttccagtcggtcagtcgcctttcttgcgtcgtctgctggcgcgatcatccctcgcgggccttgcccgtcgatacgcgcagcgctctgacctctgctctccttgagtaccgcagacgaccaagccgccccagctgctcgagcacgcccagaacaagcactcaaagggcctcgagtgcttccccggcgtctcggcctaatcggtcgctcctcgtcggcctaacccccgacgctcttcgccgccgccgcctcggccccccttcccctagagttccggccagccctttgctcccgccaaccccggcccccttttccctgccttcttgggtctcatttgatgtcttgcacgaacaatagcgctgtttgggggcgcggacgatctgaaagggggaccgcctttcgcaccgctgaccttccgtctcacgtgagggactacccttcgccctctctgctacctcgttgactttcttttcatcgccgacgggaccgctcatcctccgccgggtcttccgccggcgccgccccctgaccggccccagcgaaacgcgtcgcctggcccgccattgcgaccgagtcctccgccgccgagtgaagggaactgctcgccctcgtgcagcagccggccgtgctgctgctgctgggacggatgcggtctcggcggccgctcccagccgcgcgtaccgcctggttgggggccggcacgcggaggcgacgtcgggccgcggtgcatcgtcgaggacgaggtcgaggtcgacgcgctggccggcgtgaaggagggcgcgaggaacgaggcgtgcagggcctggagctgggcggccgtcgtcggcggaggcgactggtactgctgctgctgctgctgctgctgctgttggcttggaccgggagggagatgctggggtggcgggcccatgagcgagccaaagcctggcatgccaccttgcgagggaccgccaccgccgctgccgttcctggatacgtaggggccagggccgccactggccgtgcttcgtgacgggctcagtggcggcggcgcgttaaagtagccctgcatcggcgggccctgcgagataggcggcgacgacatctgctgttgctgctgcgggccgttgcctgagggaaagaaaggcaggccctgagattgcatcatgcccgggtgcggtggcagaccatgcgagcccccgctgctgccggcagcggctgaggcgaacgacggcggcagcgctgatgcgggatgggcgcgaggctcgccggcgcctccgccaggggtcgcgaccggtgtcgggtagagcgaggggccggtcgaggacggcaggccgctgattgacggcgtcggcggctgcgatgaggccatcgtcggcgagacctgcttcggcagcggcggcttccagttctagagcaaggaggggggaagggtcgtcagttcccgttgacaaagatgcgttcgtcggcggacgcacgagccgtttgccctcggcaaagatgtcttccatgacgtcgtcaaagcggccgtcggccttgaacttttcggcgagcttccagagccgaagggcggcccttgcgtcctcgatcgagtcgtgctcgcccgactggatgtcgctcttcagcaggaaccacgagaggaagcggaggctgatcttgcgccggttgagggccgacgagtagatgtcgaccgtgtcaaagacctgcgccggcgggacataaatgttgatgatgcggaagtctttgctgaggccgtggccgataaacgtgcagccttggtcgacgagcagccggagcttcttgtaggcaaccttgagcgggacgagcgtgtgttccgagacgtgcgggtcgaggtcgccgtgatggatgccagagtagtcggtcaggtagtccacgacgggttccgacgtgtggatgtggtcgtcgatgaacggctgctcctccttctcgcccgttccacgcaggcacgagacgcgcgcgagcgagagccgagacggccggatgaccttgcgtgtgccgtccgaccggagctcaaggtcgtcctgcaaacagggcagactgcgtcagacacctcgtcacagtgtcttgaggtaggcggcagcacgcaccagctgcatcgcgacaaactcggcgtcgatcgggataagcgagtcgggcccaggcaactcctctggcgaaaggttgcggtgcttgatgcgctgcgggttgcgtcgcctgcgagtcacaaacgtcgaggcgcagcgtcagtctttgtgaagcacaatcggtcggcaaggcgcgactgaccacgacatggagacgtcgacattgaggattgacggatcaatgcccatcggcagcggtgagaggtcgagcgggttctgggcatcggcgcgctcgtagaacatgagggcgggcatctgagtttgacgcaaagggcacgctcagcgcggtcgaacaaggcaaagcagccgaaagggacgcaccttccactgagcggtgaaagagagagcctcctcctcgctgatgttctcgacgagaaagtcgttgaagacgaaccacggcgaggaggcctcggggtcgagctcgtcgacaggaactaatcgaggtgggcgtgaaaggcgcgtcagcgattgagggctcggcgacaggttttgaggcatagggacgcactcttgacgattgcgatcaggtggcggtcctcggtaccggcgtgcgtctcgacgacaagggcctaggcggatgaagggggcgcagagtcagcacacacgacaggacagcaagcgcaagagtgcgcgcgcgacgactcacccggagctcgtactcgctcgcatccggcccccaagcgtccttcttggtcgggctcaagatccggacgtcgtcccccccacctgcgccctttgaccggccgacgccaaacctcgccgggaggaacgccccgccggcgcttgccggcttgtccgtccaaaagtccgggatgatttcggccgaatggacagcggcgttgatgcagaggacgggcgggagggttgcgctgtcggcgagcgtccggcgcgtccgaagcggggcaaactgcttgcaggcgttacagacggccttcgtcgttgagtcgcggatgaccgtctgctggaggaccgagcagaagtcgcgtgccggcgggggctcgttcgatgggcccttgagcgaaggaagcacacgggtcaacgagggcagacagtcgtagccgcagaaggaggatttgacgcacctgtcgcgggtaggcgaggtcgagcgtgtgctggaggatcggccgggtgctcttcgctccgcaaacgaggcacgccgtcgtttgcttgaagtcaagccccaggatctgactgacgaccgacggcgccaggccgttcgggtcgcggcctcccgtcgccgaggggggcgggggcgccatgagccatggctgggcttgatggccgttcgcccacgactcagtcgccatgtggtcgagtgcaaagcgcgtaaagttttgaatgagcgacgcgtatggccggggcggctgcaattcgtcctcggcgtcaaagaggccgagaggggtcgctaagaaacaacgcaatatgtcagtctggagtgcccgctttgcgccagggacgcccttgccagggacgcaccttgctgcgtgccgccgaacgcgcgcgagaagttgctcgcctggcaattgacgccctgtgcgtcctcgagcatccggaagaggaagccggcctcgcagaacaggcagtgctctcgcgggcacgggctcgacaggtggcttttcgcaatctgccggaaggggagcgtgtagtggagcgcctggaggagggcgttcgtgtacgagttggcgatgtgcgtctcgaggccggagtagcgggtcgagttgtagaagctgaagtcaaaatcctcgatgcctgccccggcggacgagttggatggggagggatcagccgcggagagggcaacctgtgcagggctgagaacgggcgcaccaaacttggagtacttgatctcgactttccggtactttccgccctcgtcctcggccgtcgactcgagtcctgcgcccgccgacccagcctcgcccgccgcgcccccctccttgtcccgacgactcaggtgcgtctgccagccgttcctcagctcatgctttgtctgtctcgccggcgactgaggctgctccttccgttgcagctctggcgcgacaccgagtatgtcaccaacaagattgcccttcacatctcgagcgccctcttcagtgagtcgaccggctgggtcagacgacacctgagggctccgactgactgactcccgcccgcagacggcttctcgttctggatgatcggtaactcgtacggtgacctccaactccggctcttcaccatcttccagtgcgtccgcctccttgactgctcatcctgtcggtcggttgacttgctttcgacttggcttccacccctgccaggttcatctttgtcgcccccggtgtcatcgctcaggtccagcccaagttcatcgccaaccgtgacatctttgaggcacgcgagaagaaggccaagatctacagtgcgtggcaacccttccccaccctccaacgcttgcttcgctacgctgacgcgtggttccttccttcctcaggctggcgggcgttcatcctcggcgagattgtgagtgtagtcgcgcggaccggcacttaccattcacggcgctaatacgcgcccttcccagactgccgagattccatacttgctcgtttgcgccttcctttactgggcctgctggtatgccgtcgtcggctttagcttccggccagaggttgttggcccagtctatctccaggtgcgcccgaagctcacttacatctgttgcgcagtagctaacggttgccctcatccactgcagatgacgctctacgagttcctctacaccggcatcggccagatgatcgccgcctattcgccgaacgcagtgtttgcagcactggtcaacccacttgtaatttccatcctcgtcacgttcagcggcgttctcgtgcctttccctcagatcaccgccttctggcgctattgtaagcggcttctggcttcagtcttcagtcctcgactctctgctgaccaaaatcatcccctttctcagggctctactacttgaacccgttcacgcggctgctcggcggcctgctcgtcttcccaatctgggacgtccaggtccagtgcgagatgagcgagatggccatcttcaacccgcctgccggatcgacctgcggcgactacctccaggcctacctcgccaacagcccgccaggctacctcgacaacccggtgcgttcgcgttcagctcgtgctagctctgccgtggaatcgcgtctgaccctttctttcctttgccctcttcaggccgccactgccaattgcatgtactgcccaatccagcagggcagcgagtaccttgcccagcgcaacctctaccgctggatctacggctgggtgcgtcttgccttccgttgcactcggttggcatggtcgctgacacctgctactttcgacccttaagcgcgacatctgcctcacgctcctcttctgcatctcgtcgtacgcctgtgtcttcgtcctgatgaagctgcgctcgcggtcggctctcaaggctgtgggtcgccctttgttagtcatcctctcaacctttcgacgacgcgctgacccttcgattctttccttcttgccgcagtgaacgaccccttgctcctcctcccctcttcccctctcctcttctgtgtagcaccctgtccgccgcacctcgttccactgtattccttgcgaacacttctcagatagactgtcctcgcttaatgctatgctttcctaaatctgttggtcggggggacgaggcggcgagggagctagctctcagccgccgccctcccctaagatcgcccttccttccgctcaccttgccattgggcatagccgggcagctcaggacggctcacctggcggctgttgacgacgccggccttatcctagggcgacgagtcgttcgacggagaagctgcctggccggggagagggatcgaggaccgcagatattgctgactctgacccgtgtgacaccccccctctgtcgatcaactcgcgcgacggcatgctcatcacgcaaaaggatcgaactccaagccggcgttcgacgttgccggtggcggtcgagtggcggtgctcgtcggctgcagcaagccggccgagtaacccggcggtgcggccggctttggacgcaaggcgggcgcgggggaagcatgtgagacgctcggccgaggggagggcagcgaaggcgacatgctgatgctgtagttcgggccggaagccgtcaagggtagcgggagggtcttcggccgaggtggcgcgccaaaagtcgaaaaggccggcggtggggcggatgatgtaggagagagcggcgggaaggctgaccgagcgggcgcggcggtcgggggcgcaggccgcgccgtcgctggacttagcggcgcctggatgaaggacgaggcgttgaagttcgccgccgggacaggccgggccccgaggcgagatgagccggcattcatcgtgggctgcataggcgaagcggaggctcgaacggtaggtgcgggcgctggtgccggagtctgcggaacgcgcgcgttcgcgtcagcgacggtgcgcaagaagaacagttgattcgcgacgtacaggtacagagtcccacggatctgagccccaagggtcgatctcggccgcagcagcaggcgtcgtcgcgctgctcgcaccgccgtgcgcgctcgcaacgagcgacgcaaagtcgatctcagcgtttgtcggcagcgagctgccgttggtcgatccgcccgcctgcggattgaacgaggccgtctggctctggatccgctgccgctcacgcagatgctggaggtgctcctgctcgacgcgagccccgagcgtcttgatcgtcgccatgaagcggccaaactgcggcacaggacgcagtcgggctcagcataccgcacactcagcgtggagagcgaatacgactgcgagcgcacctgctcgacactcaacagcggacccatcgagaaagaccaaagctgcggcaatacgaggttcgcgaccgcctcacggtcgaccttggcgcccatcgcctcgtgtacggctacaggagggcaggcaaaacgaagccatcagcgcgatgcctgagacgagaggcgagttgtctgacgcacacagggttgccatctgcaagagagaagggggacggggaggcagagagcgtcagcagcacccacagtagcttagatgacagcctcgcccaccatgacgtccgcttctttcgtcttgatcttggccagtagcgggacgagcttctgggtaaggcttgtcttgtcgagcaccttgacgagctcgcggaagacgtcgagagtgccgatcttggtcgagaggatgcgcgtcttcgtgaagagaatctgcaagacgtcgatcgaggcgtcagcgtatcggccgcaagcatctgacctcagtccgcctccgatcagccgtacgcacggcgaccttgacaaagagaatttcctggaccgagctaacgtcgaggatgtcgagcaggcccgggatcgcccgcaagccccgctcctggacctcggcatgctccgactcgagcgagttgtagacgagcggcatgatgctctcgcggaacacttttgggctgctcttttctatgaagagcggcatgctctcgagcagagctgcagagaggggatcagcaggcgacgacgacggattccaaacaggctatgtgggagacgcactgagcatgttttgcggcgggtccgtgagggcaaagagcggcttgagggccggcagggtgaccgagttgaactcatcctttgactggcccttggcgatggcaaagacgcagggcaggataaacggaagcagccaagggtctttcatctgcaaagcggcagggtcagaggacgtcacagaagccgaccaaagactgccgcaggcgacgtacctcttcaactagactgggcagaatcttgcgaatgcgcaggcgatctgaaaagttgggcagctgagcagaggagggcgctcagaggcgatcagtcgatcatcctcccgtcgcccgtcagccaagtcggacttacaacgccgacaagaccgcgcaggaagctggccttctcctcttttgtcttggacgaaaagttggaccgatcgagaaagagcagggtcgagatggcaaggttcgagaagaagggatgagaaggtagcgtgagggagctgaggcgtccgttcgccgaacgggtgatgagctgcgacagtagggctgcagaacacttgtcagcctagattctgtgcgaggcaagcgatgggaccgacagttgagatctggcgtcagccgcgcaaaggcgaccccgttgccaatctcgccccgcgcgagccggtccatattggcgcgcacgctcgagagcgagtggtggttgctgaaggggggcttgccgccgagatggacggcgtagaggatgcagccgagcgcgtagaggtcggacgctgccgtcacttgctcgtcgagggcgtattccggggctggaagaccgagcaggtcagggatgttcgtcaatgagagacttttgcgatggtgaacggcagcacggacccatgtagtcccagtcgacctgcaagagatgaggcggcactcggtcagcaaccgccaacacaggtgcttagcttcggccgctgcgcgacgcacctggacgctgtcgggcacgccccacttgcgttcgggaaattcccagcgcgcgccctgctggccgtcggcgccgagcgagagcgtcaagttgagggcaccgagcttccaatcgcccttggcgttgacgaggatcgcctcgaccgtgaggttgttgtgtatcaggtgcgcctggttgtgaaggaatgagagcgccttgttgatctgcaggacgcccttctggatctgtgacgaggacggcagagcggaatgacaaggtggatcagtgtgccgaagcccaggacatcagggcgagtggcagggctgacctcaacctcatcgaggtccaccccctcgagcacgcctcctgagcgggccgacttgagcgttcctgccaagctcgagatgagcggttcggtcgcgaaagtgagctgtgtccgcgtctcctcgagcggctcgaccatctcgagtatgcaagggtgccgcaatcgcgagagcgatgaggcctgcgagcggcgggacgacgaccgggaaggaagggaaggcagtctcagcacgagggtagatctgaagctcggccggcctgagccgcacctccttcttgagcgtctcgagcacgatgtcacgagcagcgcgctccatctgatcgagcgccttcttctcaaacatccagaccgagacgagctgcggacggggtaggccaaacccggaagcgggttgtcagctcatcgaccgcaggccgctcaacctctgagctcgttctcagccgcaccttctgcgtcgtcttgttggtcgcgcggaggacgcgccagaggccgacctgaaagggcttgaagtcggtgcccagggctggctcaacagggcctgaggccgacgacgatgactggccgaaggcaggcgacgaggcgagcgagccgtgcggcgagcccgtgtggatcgcatagttggccgccagggccgagcgggcaaaaagcgaggtcgcagccgcgaacatggtgctttgcaagagatgaggccgccagagccggagctgaacgagatgggtggccgagggagagatcgaggtgatggtcgggtgcctgcgagagacgagggggcgagcctgcgcagcgggacggctgctgatggtcgccgagcagcgatcgtctgtcgccggccgcttcaccgctcgcttcaagcaggcgagtcgtcacgaccttaatactgagcagatttgcgcctttacaagagctgcgcagaaggatcatcgagacgccgggcctcgagcgaccgccggctctaagagacatgccgactgcggccggagcgtgtccgccagacgacctctatgagcagaccctcaggcgtcgatgcggacaaaggtggcgaacaggtatgccgaacaatgcgaccgtgagtacggctgctctgcgtccatgtctaggatgcgatggacgcgaggggctagcggcacagcgtccgagggctggccgggcggcaacgagaaagggtgaacagctcagggtcaaaagtcctgcaggagagagacggcccgctcatgggtcagcaaaggcgaccaggagagacagtcaaagagcgcgccgcacctcgaacaagtggccaaaggcgtccgtcaccggcggggcgcccgacatgaagaggccgggaaggtcctcgggccgcggcagagggtacttttggaagttctgcgtgtcgcctaagaaagataaggacaggagacggccagtgagcgagggtcgacagcatggttgagagggagagcaggacgcaccggcgctcattaccggcggcacgatcggtgcccggatgcccttccgctcgagcgccccccaatcgacgcccccgaaccaagggtgcatcatgacgtccatcgctccaccgcggaggttgccgagccgctttgaccggtcgactgtcagcaagcgccggatcaggtccttagcgtacgggtcgacgactgagggaaaggcgggccgggaggtgagaatcttttcgtagatgcccatcgggttgtcgtcaaagaagggctgcgaggttggacaggagcttcatcagttcgggagtagcggctgagcggtcgtcgctgagaacgcacagggtagccggccagcatctcaaagcacaggatgcccatcgcccaccagtcgacggccttgccgtggcctttgctgaggacaatctcgggcgcgaggtactgcagggaagagcggaaattaagtatcagctgaggatagctgaccgaggccgggagtaatctgactgacctcgggcgtgccgcacagcgtgaatgtcctgtctccgacctccttggcaaagccaaagtccgctatcctgcaaggcagagaaggtgggggaaaggttgtcagacgtcgcctatcgggactcgatcgggcgacggccgatccaaacgtaccgcaggtagccatcccggtcgagtagcaggttctcgggcttgaggtcccggtagatgatgtcttggctatgaaggtctgcagaagaagcggtaaagctaagttcagccgtcgctctggtcgtcgctgagagggaacagacgcacaggcaatcgcgaggatgatgctggagaggtagaagcgagtgacgtcggccgtgaagcgtcctgctcggcggaggtgcgagaagagctcgccgccgggcacgtacgacaggagcatgtagacgttgaccgggtcctggtacgtctggtagctgcgtgtgatgggcgatgagggggtcgtcggttcagctagggctgcaagagcagagagactcagggctgcgggcagggacgcacagctcgacgatgaacgggtgcttgacgcggccgaggatgccccgctccgactggatgtgctcgacctgcttcaaccggacaatctcggccttggcgagcacctttagcgcaaagtgaggcatgctctgcggtgacagggtggttggtgatgagcttggtgaaccgccgttggacgcgtgcgccgccgctgacgatgggcccggcacggccgaggccggactcgataacgaaggcgatgaggatgacgaggccgaggaggctggcgcaaagatcggatgaggtgccgagggcgccgttgaaggcgagcggacccggacgagcaggacgcgaccgaatgtccccgtccctgagacacgagacggtagcaaacgggcagacaggagcgatctcgcagtcagcccagcatgtcggcaggaaataagggcgagctgctgagcaggacggaccgagcgtttcgagcacctcgaagcgggcgagctcggcggccttggtcggaggaagcctgacctggtcgacggggctgcccggcggcgcagggaccatcgcacccgaccgttgcggcggcggcagctcgtctggcggcagcatggcggatgagggtgagccgatggcggctggcgacgagagcggatgtgttgctggaggctggcgagcaagcgtcggcaaggcgtcgagcgagctcgaggaaggctgaccggaaccctggatcgacgtgtggctcgagatcgtcgaggtcgacgagccggcggccggagggaagaggtgagggaacgcctgccgcgggtcgagcgccggagcggcagacatggctgccggacggaggagaggagagagagaggatgaagccgggcacggaggggagagcgcgctgcgaggaagaggctgggctgaacagttgaggtcggagagacaggaggaaggcagcgccgctcgactcgcgacacgcaagcgcagaccgctcgaccgggcgcgctaccccggggaccccgaaccggacgaacaacacgaggcacgaacgcctccccgccctaaaggtttgtggtcgacgtgcaacacgatatcatctagaggtccatctcgtcatcagcgccgccgccgccgtagccatcgcggccgagaccggcggcctcctggagccggcgcatctccttgtccttcttcttgcgctcggccttctgattcttacgcgcgagcgggttgttcatgctcatggccagcgtctcgtcccgagtgaacagccgcgaggtctgggcattcttggtccgtggcaggagagatgcgtacgtcgaggtcgaggccggatagctgcgagtgaagaaggtcagcaagggaggaccggaaagtgtggagaggaagtcgacgcacctggaagactcggcgtcatcccggtcgccgtcgtccatctcttcgcgctcttcctggaccgagccgagtggcgccgcggccatccccgagtcgcccttgaggacgccgaggccgacatagtcctccatgcctccccagtcgctgtcgagcggctcaccgaggtccatctcgtcgcccttgccgtcgaggagctcgctctcgtcctcgagcatctccaccgctggcggctcgcgctcgccaaacgcctcctcgtcggcagcgcccatcagcgcgctgatgtcaaacgcgggcgcaaagcccttgacgatggccgactcgcccgcctgcgcgcccgaggtgaacgcctcctgggcgtactctggcgcgtgcgagttgagcggcttggcgaccgacgacgggtggacggccggcgggaccgtgtggtacgaaatcttgccggtgttccagtcgcgcaggacctgaactgccgacgactcgagatcgggcacgccgcctttgccgagccggccgcggacgagcgcgatcgagacgagaaactgatttacattctcgaagggcgggacagagtagagcttctcgagctgggcgtgctcgacccggttgatgatgatctccactgcgagagcaaggtggcgtcagctgcgaagacccaggctgaaagcaagcaaaagagcggtacgcactcggcgacaggacgtcctcgacgagctcgggcttaacgcagttgcgcaggatgacctcgcctcgccgcctgcggacctcctcctcgctcaggcgctcctcggccgtgcccatggccggatcaaagacgatgcccgggcagtcgagaatcttgacgcccttgtcgaggctgacctcctggacgacgcgcgtgtggcccggcgtcgaggcgacggggcaggcacgcgagcgcttgagagagttgatgagcgaagacttgccgacgttcgggaagccgacgatgccgaccgtgagcgaccggccgggcgggaggtgccgggcgtatgacttgagcagctggatgagcggcgccgcaccgagcgcgagcgacgtcaccggcgtcgtgagagcagcctcggccgcgtgcgtagaatgcgtcgcgccggacgacgagacgggcaagtgcatgctcgagatgtgggtccgctgcgactgggtcgacgacttgaacggcagtgttgggaagtcgtgcctcaggtagcgcagccattgctcaacagccgagcgcgggacaaggtctggaaggtagcgacaaggatgtcagctcttggaaatgatcgccgctgccatcgaagctgccatcattcaccaatcttgttaacaacggcaatgagcttcttgccctcgccctctcgccgccggacctcgtcctcaacgtagcgactgcggccgccgagcgggtcgcgggcgtcgaggacctggataatgacgtcgctctggtcaatgaccttgcggagatggctcataaatgccttggccgacgagtctttgagcatgatggacgggtcgagcggcggaagctcaaaggccggctcagccgggtggtcagaggcgtaggtgtgatcggccgaggtgctcgtcgtcgccatcgaggcaaacgtcgtccttgcccgcttagccgcgctcggaccctgcaccaagcgagcgggagggactggtcagtccgcttgcttcagatacctgcgccagggcggacttggacggcgagcggcaagcggcgagcgtcagggaatggggtggaggcacgcaccggccgctgctcggcccactttgccttcttgtcctccatggccttggccttggtctcagccttctttgccgcctttgcggcaaatttgggcacgcccgggtccttgcgcttctctgtgagcaggacagggagtggcgcgagcagtcagcgagagctcgaacgcgagggggcacgggcgaggggagctcgagcctcaacgcactctgagctgaggggacgccaatcttgcctatgagacgggccgctagggaggtcagcagagctcatctcgtgataaagcacctggcaggccgcacccattatgtctgggctagtctgtggagagagaaagggggggggggtcgtggtgctggtctcgaggcggaaggaattgactgcgcctcgttgctgcctcggctgacgaaccctaactcctccagccctcgattctcacgcaagtcgtccagcggtacttgatcgcagccacttgctgaagaatatgaggcataggatggtcgtcagagtggtcctgaatggcataagagtacaggagtgatgcgccaagctgaagacatcgtgcgtggatgggagcggccggcccgactactgcagccaggcctcgtcccagccgagggccgagcggtcccagtcgttcccgggctgaggcttggaccaaccctgagaccggccgacctcggccgccatgcggacaaagatggcgccgtcgacgtccttcatcccagggaacgtctcgcttccggcgtcgtcgaccgccccgggcagcgaagcggcgagcgcgtgcttccggccgagatggagcagtattcggaccgtcttgatgacgtgcgagtcgggatggccgagtgtccgctggatgatctcgcaccaggcgttccggtcggcgttgttcgactcggccgggtggtcgggccagctgagcgggatccgagcgtcgatcgtcggccggccgcgcgagaggctcgtgacgaggacggtgagcatgtagctctcgagtagcgtccgctgatgggcgaaagtcggcaggagcggcaggatcgaggggaggaagagcgacgaggtgaggagatgcatctgcagtgggcagcggtcgacgcatcgtcagctcggctatcaaatcgagcatccaacgtcgcgacgcacgaggaaaaaatcgatgcgcgtctccttgctgagccggccggtcgagcaggcgaggaaggcgttaaggacctggacctcgtcgatcttgcttgcgacccaggcctccgtcttctcgtctttgccagcctcaaccgcgggcgccgatgccgtccacgcggcggcgagcgcctgcatgcgctcagaattgcccgagccgattgagtccttgatgcgggtgttctggcatggcaaggagcgtcaggaaaccgcaaggatgagaggaagcggaggggcgagacccacgatcattttgtcggcgtcatacggctccaggacaacctcgcggtcgtcaacgaagcgcttgtagacctcaagcgcagtgacctgagcgcctttgaagtgatctgacgcgccaccgagcccacggaggccactgtcggaacagggccacgagtcagggtagaggccgccggtcgtgtcggccgaatggaccgcagcctctgcgaggccctcggcgagcagcatcgtcgagtcaaactcggctccaaatccaagctggatgtacgggtctgggcgcgaggaagatgccggtcagtcgagctcccgaacgtgcacgtcgcaacctcgcatgtcactcacggacgacgccggcggtcagccggatgagcatccgcgggccggtcttgttgccgcttcctcctgcgttctgtacaagtcacaagccgtcagatttgccgcatgaccttctccctgaggcggaggaagccggacgcaccgcctcctcggagaagaggtatcgatcgagcgtcgccgacacgccccgctgcgcaagctcctgctcaaagaaggcgaggtagcgggcgtatgcgctgcttgcgccggaacgcgagctcgaacgggtcagcaaattgccgagcttgaacagaaagacagagcgacactgactctgcgacgccggcatagtcggcccagttgttgacggtcagctccgggatgtcggtgcggaccttgcggccagccttgacgagctcggcctgacgggcgaccgggtcgagcgggacgagcgtcgtcttctcgtcgtcaaagatgcgttggagcagcgctggcgagctgccgagggcgaacgccgtcaggagatggtgctaggcgaatgacggcgagttcgtttcagccggcgtcaggcaagcaaaagcagagcgtcgactctcggactgacggcaagatggttgtggaagatgttgttctgctcaaagatgttgtactggtggtgattctcgatcaggagccgttggcaggccgcctggctggccggcgtcgcaccgggcaggtggtggatgaggggcgagagccggggcagggcgaacgcagcggccggggcggacgacattggtcgtgagagggcgggaatttggccgatgagcgagctggagagcggagagtgctgaacgacgagcggtaggcgggctcgcatgagatggtcggtgtcgagggcgaggaggaagaggacgaggtcgagaaggaagtcagcaggatcggctcggtcagcgccgacctgcgcgcagcagccgacagtcgagcgcgcgcctcgctcgctccttcgctcctgccactgctcttgcactcttctctcttctcgtgctgcatcttgccctctgcccgtgctcttcttctgctacctgcggaaagttcgtctcgcccgcgcctgccctgagccggtcttgcaaggtgcctgcgcatttcgccctgcggcccatggactccctcgctgctgctgtcgacgttcacagaccggcaggagggccgacgacaacggccgcccgctcttggctgtcggtgatgtaggtcgctcgcagcagtctcaaggaagcagaagtgatgggcatgcgatgataaggggagcgggggtgggggggggcgtgaaggtcgtgcgtgacgtgcgaggtgaggatggtggcgagaagggtcgtgagtgatctagtggaagaagaagtcggaatcctggacgcgctcgaggtcgagaatgccgggcgacgggcagggcggcagcaggtcatgaagcgttttaccagcggctttttccgagccccacatcgcccaggcgtcgagcggggggagctccttcttctcaccctcctttgtatcgaaattaaagtcggccggagcttcgtacttgccgtggtgcgcgcgcttgagtctcgccgtctgatacgggggtatcgtgtggtggccgtaccggcggaggaactgacggcgagacaaaggaaatagaaagagatggtccgtcagccggctggcctcgcgacggctcgagcaaagtgtaaagtgcgcacctccttgcgcagattctcgagaacgtcgtcccgatactgcgagacaaaggtgagccgcgtgatgtcgcgcaagagctcaacgtcggccgcgtgcgtccagtacgagtcatggacggtggccatggtgaggccgtggtgctgcgagacggcggcggggtcgagcacagtcagcagtctgagcgagccaaggcggcgttcgttaaggaaaaagagccacacctcgcagttgatggcggtgcggaagagatgggccgcgtcgagtctgacagagcaggaggcgaatggagccggtcaacaagcagctttagagcgggaagggcgactcgacgccgctaacagaggagacggacgagtggatatagtttggcgcaaaggcgtccagctccttccgcatcatgaccgaggacgggtcgtctgggtccttgatcgagactcgaccggccaagctcatcacctgccgagcgtttcagataggtcagtgtctctggcggcgagcaaaggcgccccgcacagacaaggcgtcacgcaccgatttagaggtaaaggcgcgaatgtcctggacgacggggaagccgagcggcgtcgtccatgacatggtgatgtcgccgagtgagatgttgttgccctcctcgctgaagccctcggaccggaggatgagatttgcgcacgtcaagagccactgctggatggccgtcgcccgcgggaagaggccgtcgatcttagtaagattggtcttcgaccagtagcgggcgatgtgcgacgggccgcgctctggcaggccgatcttgatgagaaagtctttcgagtgttggaaagcgccctcggacgtcaagcctggccggcgtcgagtaaggtcagtagaggaccagcagcgtcggtaggcggcaagagagacgcaccgtagacgcgagtcatgaccgtccgcttgaccgagtcgcggaccatcgttttctcccggtgatcgatcaggaacttggcgccgggatgaccattcttggcgtccttctcgacttgctcaatgacgcgaccgaggacggtcgtatagacgtcggccggccgttcggccggcagcaagttgaccgccgatccgccctcgacgtctcgagcgagggccgcatagtgctggaggccgttacatgagccgtcctgatggcagggcaggttggacgggtaggcttcgggcccttcaggatgggcggcggcccgagcaatctcggcgcacgtcgcccgaacctgccagacgtgatcgcctgtcgtgtaccagcggttgccctttgaagcgcaaaggaaagtgagtcagagggccaccgatatcctggaagcggaacgcacgtcgagacccttcgtgcccgagtcgataatctcggcccagttggcttcaacccaggcgaggcgctccggaaaactcgctcgcttagtcgcgccaaagaggccagcgaggtggagcttgagcgcgcgccagccgtcggcaccgaggacctttttcgtgtcaaagacgaggagcgagcgggccaggtcgtttccgacggtcgagaattcggtcgtacacggatagatgcgaccgcggtagtcgggccggacaaagttgtagaaggtgacatcgcggtaggcgcgcgcaatgtcgaccccggtcttgtcctcagcggcgagcttgaggcctgggatctgctggaggtacacgatggttgacggcgagcgccgtgtgtcgggccagagccggtcgaggtcgtcgaggatcgtgtgcgacgcccgccaggccgtgctcgagaggtaattgattgcctggatcatctcgtccatctgacccgactcgcgggcgtgggcgacggccacgtcgcgcgtcttggaagacctggcgttgaggaattctgcgcgcaagatagagggcgtcgcgatcagggtcagtcggctgccgacgaaaccgccggaacgtcaaagggcacacggacctcgcttgagctccaggtagccgccgtcctcggttcgcgtcaccggcaacggcgggacaagcatcggcatgtcgcggtgagagttgccgacgtgctcgacgtgctctgcgagcttggtcagctgtgggtggaaacggacgactgacggcctaagcagttttatcttgctgtcgtccaaatcgacgcagtgctttgtccaggggcgagccttgctgcaggtgtcgccgatcgccaatggcggagagacgtcagcgtcgccggtctagtgcgcacgtcgagctgccgaaggactgacatttgctctccatccgcgtcccgacccggcatgagaagctcgtgctcctgactgaggaagagtaggtcaccgccaatcttgatgcaggccgcacggctcagtcgcagcggttgcagctgttcaagaggctcatcgtcccttgagagactgccggtcttctctccggacccttcaagtccaaagaagcggatgttgtactcgcgctcgaccgcctggccgagttggagcgcagcttcataaagccggacatcgtagggttgctccatgtgctgaggcttggcccgggccccgtcctcggccgtctcggctggcggctgagagacagacgtggcgtcctgcccgagtgcctccgtcatctcagcattggccggcaagggggaagtgatgccggcctcgcccgccttggctggtggacttgcggccgagtagctgtgagccggcagcaacaagggctttgggttcgagacacgagtgatgaggcagtcgactatcgtgcccacgatgagccggctgaggtcctgggtggtgagcacctgcacgccctggtgagctcggttgaggatcccttgggctgcgtcgagcggaggaaggggggggggggggggcatgtcgatacgtaaaggcagagtaggggcaagaatcagcaagggtgagctggatgcaagaggatagagggcgtaggcgaaagggggacgaacaacaccggcagacaggcgggtgccgatcgaggcgttcgagtccttggcgacctccttgttggtctccttggaggcacccgaagcgagctgctgggcagactccgaaacgtagttgacggccgaggtggcggagtcgacgacggcctgcggatcggaggggaagatgggtcagccgacgaggtctcggagggacgagatgcagatgggctgaacaggcaggttgcgctattcatcccttgagatgaggcaacactcacgttgacgatgttggacatgttgaaaaaagtggcgtaggttaggttttggtgggttggggagtgaagagtgacgggaggttggatgatgggagaaggaagaagatccggccgcaagcgagccaggctctttatacggcgggcggagccagcgcacgcgccgacgcgccatctctccgccgcccttccatgacgacgtctccagtttgggctgcccccgacccgacggggaccggttcagcgtcttgctagaagggccgagacttttgagacgcgacgcgacggtgcttgactagcgcgcggtgccggccgccggccaaaactacttccgcctgaccatgagagcgcagccgacgtcgtttgatggagacgcagagcactgctgagcagggtcgcctttcgcatatgtgcagctgactgaacgagatggtcatcagatcgtgagctctgggcaaggatgagtgaacggccgagaagcgagggcgatgacgacggggagcgcgggctgcgtcgcggtggacgaaaggcttgagcaggcgagacgcttcaggcctgcacgtagtccgcgtccgagccggcatcatcatcgtccgagacgggcgtcggtaccttgcgcgtccgcggcctgggcttgggccttggccgggccggtacgacagggtccgcctcgggctcctcgccaaaggacgcctggccgtcgtccgactcgggctcgagcgtcggcgcacggacagccttcttgcgcgcaggcgcccgcttgcgcttcggaggcggcgagggcggaaggtcgtcgtcgttattcgcgtcggtcgagtgcgtgctcgtcgctgtcgaagaccgggcgccgccccgacccctccctcgaccacgagtgctgcccctcgccgccttgctgccgcgggcgccacgagcggccggcgtcgccttgcccttgacgcgcttgttgggcttgacgacctggacgtcggagtcgtcgctggcgctgcccgagtcggtgctgtcgtcgttcgcgaaaaagaggggcttggccggcgcctgctcgcccgcccgggcggcgaccgtctcacggaagcgctggacgacggcctggagccgcttgctcgggttggcttgccggaccttcggcgcaaagacggccgtaccgccgcccgaggtgtcaaagaacgagtcgagcgagccctgctggttcgtattcgcaaagatgccgtttgaccggcgggcaatccggtggacaatcggcaggacctcgtcgtcgaccttggagattgaccagccgagctcgcccgacagcagccggcgcaggcgctcaaggtccgggaagccccatgtgaagggctcgtcggacgagtcgacctctggcttaaagtaggccgggcgctggacgacgagagggcggcacggtcaatcgaagaggcctcgcaatggttcggccagctgcgactgaccaccttgggattcggaaagcccgcgtcgagatgaatgttggccttgttcttcttcttctgcagagggagcacgggcgaaggtcggcagggtcagtggcgagcagcagcagcttgaacaggagacacgcacaaaggccttcttccagcgggtgtcggtgtcggcctcggtgtcgcgaccactctggacctttagccaccacgtccgaaagtcaacgagtccctcgtcgccgtcgccggggaactcggccatgatctccatcgcggtgacgtagccaatgccggggaggccggtcgcgtaatcggacccgagtaggaaggccatcgtgacgagccggtcgcgcgtgagggagagctcgcgcaggatgtcggtcgcgaggtagcactcgacatacttcgagtcgttgaagaggttcttgtagcattttgagccgccaaagagaaagacgtccgagtcatcggtgatgatgccgtcgacgagccgcaggttggcgagttcggcgcactgggcctcggcttccatcggagccgtgatgtaggggatgccaaagctctgtagcagcatctggaggcaaacagacggatgcccaggtcagtgatggttttcgtcagcagctgttgtcggaccgacgacagcgacgcacctggacctgagcgaccatctgctgcgtgatgttctcgtcgccctcgcccgtctgcttcttgcgctgttggttgagcgtcttgagctcgttgctgagctcgtcttgaacctgctgcagatccttgcccttgacttgggagaggaagcgcgcataatcgtcctggtcagcgctctcgtcgacagcgccctcgtcggccgtctgctcgtcaacttcggcgtcggtcgggggctgctggtcgtcctcggcccgataggcctgcatcggcggcggactcggtgaccactccatctcgtcattatcgggtgcgagcggtacgggcggtgccggaggcgacgactgccattgaagtgtccgggcctcctgagtgagctgcgcgccgccgaccggcggcatattcgattcttcctcagtcactacagccatcaatggctgaggctcgagtcccgccactagaggaggcgagtcgggcacgagagcttccggtgacgaggcagctaggtcgacgaccggcggcgaacgagcctcaggggcagaggacggcgccgtcgctgaagtcaacttctcgggcgacgccgcaggcgagcgataagccggccgaaacggctccgcttgattttgcatgaacggcgccgaggtaggggtcggacggtccgaagcagcgacgcttgaagcgaccgcttggtcaaccgaccggtgagctgaagccaccttcggtcgagcgacggaaaaggcgaagtacgacgagggagtaggcggcatcgcgagtggagtagacgtcgattcggagaaagtacgcgagatcggcagcggcgacggggagcgcgacacgacaggaccggccgaggcgcttcctagcccgacgctgaccgtgatcggttcggcgacgaggttgttgtcgtcgtccgactcgagggcgatgacctcagcaaagccgagggttggagccggcggcgcaggtgctgagaaggcaaccgtcggacgaagccgcggcggagtagggaaatggatctcctccatctcgtctgcactatcgccgtcgaccgaagacgagccgagttcgatgtagaccggcgttgggcgtaagaccacggttgagacgggacaaacctcctccatgtcgccgtcgctctcgtcgtcgtcctccgggacggtcgcaggtcgacggctcagagcgatggcggcctcgagttcggcatcaccagccggatccgaactcatgaaaggctgcatgcccgctgatgcttgcgccgtcgtctgccccgtcgccagcgtcgtcgccagcgccgcatcctgaccgctgagctcgagcgccctctgaagatcttcatctccgtcctcggcgagacggaccgccgccaaggcaccgtcgtcatcgctaccctcggccgaggacgactcgatctcaaagagcggcggcgcatcggccgctcgcggagcagcaaagatctgcggctggcggacgaccttggtcggcttcttgacgggcgagtaacgggcggcgagcgcgtcgagcgctgatttgcgcttctgctcgagccaatcggggtcgaccggcttgagtctacgaatgaagacgtcgataatgctaggtcagcggaaagatggcagaatcgacggaagactgccgacgtacggctcgggccggtggaactcctcctcactgtcgtcgccgctgagctcctcgacgaggacgccgccgcggaccatgcgccggcgcttgcgtggccggccctcgccgccgatccggtcgtcctcctcgtcctcctcggcgatgtcgataggcttctcgctcgtgccctcgttgcggatgccaagcgaccagccgccctccttctcgttcttgatgaggcagtactcgcggcccttctcgccggcaatccggccgccctcagcgacgagcccgccctcgacgccggccaagccccacatgcgctgcgtcaaattgttacggaccttaaggccggcaatctgcgcctttgagaagtcgagtgcggtcgccgagctctggaccatgagcgccgtccggcggtagttgggcgcgcgcgagcgcagccgaaggtcgttcgtgatctcgtattggacctcaggcggcagcgcgaggaactcggcagacgagacgtcgaggtccgaggccttcatctcgtcgataaaatcgcgcaactcctcctcagttgccaagcgctcgtccatcttgccaccggccccagacgggtgcatcgacttgttagcgagctcaggcagctcgtacgggtcgacgcggacgaatttcttcttgcccattggcgcagcctcgccttcgccgccgcgcttgagcggtgacaccgagcgcttcttaggcgacaccgaacgcgaagccgacttagtgaaactacgcgagcgggagcgggaagggccagcctctgcgttcggctgtccgttggactgaagagccgagttggacgacaatgcccgatggaccagcggcggcgcgctgaggtcgttgaggaagaccatgtcgtcggtgatgaggtcgcccgtgtcgttctcgtcctcgccggcctcgtcgacgtcgatgccttgaccgccctcgtcatccgacaccgcagaccgtccactcgttgtccgtttgagcgaccgcttgctgtaaaacggtaacgtcgaattgtcagcaggtcgttgcaggtgggacgcgtgctagcccgctcgacgcacgcttgagcctgcttgagcgccgcctgccggagctgcaggttgaggatcttctcagccgtctgcgcgtggttcgtcgcattgccggccttacgacgcttgcgttcgttctaatgatagcaagagagggcctcgttaggtagcgctcggagtctgggaggagcggcaggcggaaaggggggacgtgcgatggtgctgcgcttgagagccggcgcgccgccgtcgaagacaaagactggcttgatgccgtggaagaggagcttgttgatgcgcctgagaaagcccaggacgtgtgcgttgaccagcgtccgaccttccttgtccttcatcgtcgcttggaactggaaggggggttgttgagagtcagttgagaggggctggcggccttctcgccacgcgagcccgggcaacgagcattagcgcacctggtagagccagatcctgagaacggcagggccaagtcagcatgaaatatgtcaagcgctcagaggagagatcagacgcacgacgagtcgatggcgaggcgcttgccttcgagcgtctcaatcctagacgtgtgaagcaggctcgcgcgagtcagcctacgtcacctcgaccagtggcgagcgacggactgcctcggaacgcacttgattggccgggcaactggattgaggagggcccacaggcccttgactcccatcttactagccttgaaagcagagcaaaagggccttgagaaggagtcgctggcggaaaggacggtcgacgtacaagggcagctggctacgccgaagggacggcgcgagccgacgcgttcgcgtgatcctcctgaccgtgcaactgaccgtcttcgggctctaaagacgacggtcatgttcatcttgactctccgcaaattagctcgatggctctgtgatcttgtacgtcctgtctccctgacgcaggcctggagagctagcccgagcgtcgccgcggctcggcccaccccttcgtcctccgtcctgatcatctcggctcgcagcacctatgctcattgcgagacttgcgcttgatactgccccaaggcttgaatcccgggtgacacttaagtctcgacgacaaagctgagtccgagtgatgcctcgaacgaagtgaatgccgccgcatacggcagctcgtccttcgacagtcagcagtgcccggcggacccttcctgtcgataccgccgacgccgtacaggactgatcgtcgtacaactcttgtcatacatgaggcatggaccagctctcggggccggcctgcggagagggcggaaggagaggagcgagcgcaaacgacgagctatccctgctgagaagttcctccaggaggagtccaggccggctgatgcggctgatgctgattctgctgtgcacggtgctgatgtggggtgtgctgtcgctgctgctgctgctgctgctgctgctggtgcgtgtgctgctgctgctgttgcgcgtgctgctgctgctgctgctgctgggtcgatgccggcgggcctgaagcgagaaagtcgatgccgagcgtgagcgagaggccctcccagtcgacctgctggttggccgtgctccagtcgtcgccctgtggagcccagagcgaattctgatgaaaggtagaagacggtcgacgtcagcacccttcagtcagctggcaggcaccaacgactcacgagaatgccggccgtgtgcgagtcgggctcttcgacggcgtccatttcggtcggcagttgcgggggctgcatctgcgagtaggagtaaaggaactcttcggccagcggtggcgtcggctggcggagcggtcgctgaccctgttgctgcgggcgctgctgctgctgcatgtgtggatttacatcattgaagccggcgagcgactgtggcgcagagggatagacaacgaggtcagtcgcttgtcatgatggaagcacgctcgaaagacgcacgtgatcggtcgcttcggtcttcatttcgccgacgtcgctgccgttcgacagggttcggctcggccgagagggttcggtcgcagtggacgattggcccgcctgctggcgtggcgagggtgaccgggcgttgcccttgaagacgcgagagcgggccatgccctggttgcctcgctcgattagacgcgtatgaaggccgatcaagttggacgagtcgccttcgtcgtcggagccgtcgccgtggccgtggtcgatcgagcctcgaggtccgggcgagggcgccttgaagaatggcgcctggcgtccagagagcgcgtccgaggccttctcacgcagcttcagtagcagcgtcagactcgtcatggtcgacttggcctgggtcgcgaccgaagagaaaaggttgcagacgctctggaggttcatccagccgaagagcgcgagcggcgactgcggggccgagatgacgagcgaggccatgcagacggcggcagatgcggcgtggtacctgaggacggcagaagcgcgaggatcagcctcagaagtcaagacgggcgtcaaatacgggggaggaaagggtaaaagggagcgcaccagaagaaccactgacgcggggtagacgctgacggagtagcagaggggcagcgtcagatgcaaaggaggcttggccgggacaatcgactcactcgggtacaggctctgcacactcataaggatcgtgatcatgatctggaaagaagagatcatcgcgtcagcgcagtctcgcagctgttgggaaaggggcgctgcgctgaacagcacgcacactgcatcgctccgctacgcagaggtatgagtcgccgtaacgactcttgctcgggtcggccgggttctcgtgaagggcacgtgcaaagaagggccggagaagaaagaactgggcctcgctcgcgttgagcgacagcgtgtgttgctagaggggccagaagaggcaatcgacgtcagtcctggtgctcgagtgacagcgacgagagaagaccgacctggaacgtcagtcgcatgtcgcccaccctcgtctcgggcgaggcgcggttggcagcatcgggcgtggcgtaggccgaggtcgtggcgagcagcgcaggccggcaacgcagaaaaaatgggatcgacttctcgaaagcggtgctgagaggacagaaacgcaacggcacgtcagctgattgctgctcgagtaagactatacatgcagacgcacatcttcttcgacaggcggttgacctcggcgtacgatggcggggtaatgcacatgacgtggtcaagaaccctggcggtgaagagaccgggtcaacagcagctctacggcgtctggacaggatgcgcgggcacttactcgtttgcgagccggcccatacggaacttgcatatcgagtagccgacggtcgggtcgtcgcccgtagcaggcgcgaccgcgtcgacctcctccgggaaggccgtgtcaaagtgcttcggcgtcatgccgcccggccggccgaagcaattcgactggaacgagtcttcggtaaagatttcccaccagactcgtctgccaacagcccagggtcagcctctgactttgagtagactgcatctcatgtaggtcgagacacacctccgctcgtcgcagatgaggggcggcaagttccagcgctggccgtcgcggtgcatgcccatcgcaacggcttgtcgcatcaagaggccccaaagcgaccagaccacgtcgccgcctttgatccggtcaaccgacctggacggaaatgcacatcgctcgggtcagctcggggcaatcgagaggcctgattggacggcacacacaggtggtaattggccattatgtgcagcgtctgaagacttgcgacggtcggatcattgctcgagagctcgagcgcctcgacgcagagtgcatggtaggcctgggcttggccctcgtcgagcgccggcccagttgactgccgagggtcgtagtacgagcccatcgccatcgcgacaaacaagagcgcgagcttgtgcggatgcgtttccgaggtccattcgtcagttacgagtgacggcggcaggtgccggtcggccgagtagaaagcctcaaagtgggacaggagcgaggactggctgacgaccgtgtgtctggatgaaggtcgtcagggagcaatcgagtcagtcagacaggagacaggagagagcagcagcctagacaaaagcacttacaaccaggcgtactccaggtagtagaggttgatcaggtacagtgcctcgggacgcggtggcagacgggcgcgtagctgggtgtaggtcgccgggccctggcgcgtgttggccttgagcgacgaaggcaggaacgacagaaacgagccggacgcggccggtgtctgacgctcgccggccggcgtggccgagtgcatgtgctgcgtcggccgagagtagtcgagggcaggtcagccagctgaggcggtcggggcttctctcgcaagtacgacttacctcgttcgacagccagagactgcctgcagtcgccccgacgaatcgcgctcgccccgccttgccgagctcaagcgtgccaaagctcgggatccagtcatcgtcgtcgtcgtcgtcctttccgtcggccttgccgccgtcgtcctcgtcgctcgaggtgccagcacctgtgccgccgccgcgcatggccgaccgtgaggccttgatgctcgaaccctccatctccttgcccttgcttcggagctccgaggggatggcaatgttgttcgccttgaggagcgcctcgagggccgtcaccctattttgcagcgtgccataggccgagccttttctggggatcaggcgaaagtccgccaagcggcgcagagtggtcctggtcagctgggcagcgctcggccacctctgaggccaccgccgcgcgacaggctaggacgcacatcgcgttctttggcggcaggactccatctgggcagagcgagtggcagcctcgcttaatgcacatgttgcacggaactgccccgttaggtcattcgagcgggacgcggtcagcttggctagctcgaagccgccgggccatcagaggcgccacgatgacacagaggcagaggaggccgtactcttgcggtcgcacttcagcttccgtctccggcattctgcaaggacatcaggtagggcgagttagccgcccgtaggtgattcagctctgctcggagggagcatgatgctgaacgacgaaccggcgcagctcagcctgagcgccgcagacgagagctcggccccgtggctgcccgaggacgatgccgtgcctgcagccttcgacggtccaggcgtgtccatcacgcccatcttggccgcggcaagtagggtctaaaggattgtatgggaagggagggtaagaaggatgggtcgtggctgttggaaggctggacagcggattggccggccgccggcaaggggtcttgctcgtgcgggccggcaggccgacctcggtcgccgccatcacatcactgccgtccctcgatccagggttcgttgctgaggtgacagcgagcggcatgtgcttcgaaagaccttcgtcaggcaagtctaagcttgacttgagaagaggaagagtcggggggaggtctgctcctgccggccggccgcaggcgctgctgctccgaggtcggtcaagctgcggtagcgccgttcaacagacgagatccgaccgggggagaaacttgcacgacgaagtttacgatctcaactaagagcatgattgagcccatgaattgtcgcagaaggtcggcaggccaatgtctacgagcagcagtatgtccttcggagccgagccggcgtcgacggcccaacttgcgggagttggatgacgcgcagcgaccactgacgagtcgaaagagagtcagatcgtccggtcgtcgactgcgagggctacacgttcttgcatgcaagaggccacaaaggggaggggatgaacaggtttcgagagaggagggtctggcgaggctcttggaagaaggagaaggaggagcggatctagtggtcgcatgacggagctacgcctggtagcccttgggtgcgatgggaaagttgaagtcgtcgaacaggacctgctcgccgctccggagcgacatggttgcgccgatggcgatcttggccgcttcaaagccgtcggcgagggtcgtcggcgccggtgtatcgtcgaggatgcaggcggtgaatgcgcgagcctctgcgacgaaggcgtcggcaaagcgctcgtagtatgtcgggctgccataaagggagcaacgtcgtcagcgatgaaagggaaacaggaggtgagggtgtggaggaggaggcgcacgtcgactcggtcctaacgccgtgcttgtccatgatggtgcaccggttgagcgccgggttctggttgacgacgaccttgacctcggtgccacagatctcggtgaagcactcgtggccgtgcgttgccgtgcgcgagacgctgaagttgagctgccggccgtcgatgaactcaacgaggcacgttgcgttgtcaacgtcctggtgctcggcgagctcctgcagattgatggacgtcagccgcgggcagattagccctcaagagaggagctgaagacgcacggggtggcatgcgttctggccgatagtaaagcaccgtttgacctgcttcgtgccgctctcggcgccggcaaagccaaggaacctgcaaagggtcgcagcaagaggttaggattggcaaaggctaagggcaatgtcttcggtaagggtgcgcaccagcgtgccgcctgttcaggcggtagaaagtcacagtcagcactgaagcgcagcatgtcgcaacgctgtccgctgagaactgacgtcgatgtcgtggataccgcagtcgaggacgattccgccgctcgttgcggcgaacgggacgaagaagccgctcgggtcgtgccggtccatcgtcgcgctcttgaccatgtacgacttgccgccgatgctcgccagctggtcgtaggccgccttgttggaggcgtcaaagcgtcggacaaaggcgaccatgcacttgatctctgggtgggccttctgcgcggcgaggaccggcagggtcgactcgaggtcgacgctcaccggcttctcgcagaggatgtgctgcggcagacgaagccaggcaacatcagcgagaagactcgttcaaacatatcgagcgcaacagcataccttgccggcctcaaaggcttggatgcacatcgccgcatgcatcgatgtcggcgtcgcaatgacgacggcctcaatctccgggtgcgcgagcatctcctcaaacgtcttgtagagcctgatgaggcacgatgtcagctcgagcctcgagaggctttgaggacagagcaagcagacgcacgcgacgccctccgggagctcatccttggcccgctcgagtgcggcttcgaacgggtcgcagacggcgacgagcttggccctagggacgttgaaggacagctgtcggttcaaagaagcccaatcagctcgcgatgagatgcaagcctcgctccagagtcaccgacgttctcggcgtgcttgaagcccatgcggccgagggaggctggtgcagaaggcaggcgcgtaagtcgggtcaggtcgaggtcggtcgtcagctgcgcgggccgagccgggtagcgtggccagccaagtttctgagagaacggcaggacggaccgacgccgatgttcagctggcgaggaggcatgctggaagggctggagaaaggcttggaaagggggggcggacgaaggaagcgatggtcggctgcgtgaagtcaagctggacagcgaaggtggcgcgaagaaggttaaggtcgaaaaggagtccgtcagcccctcgccaccgtcttgcctcatgtaggggcctgttcaggccttgtagagccggttcccttcttgtggagtcgaagggccgcacctgctgatcgtggctggtagctgagtgagcggcttgccggcactccgtcttgaggagatggcggacgcggttctcgttcggcgtttcggcgcgaaacggctctggcctccttgaagttgaggtcagctcgagttgaggtcgggcgtagcctgggagctacaggccagcgacagtcgcaccagcatgctctctcatggcagaggatacgggtgaacggcaggaggaagagctgctctgtagacgctgcgcgaggccaaaacgccggcgcctcgacgtgcctcgttctgctcctgacgtccacgccagctcactcgcttcgtcccgaaccgcacctcccttgagccatttcccgcagagcttgctgtgggcgactctcggcctccctgctccactgctgcggccactcgccatggaggttgatggctggcgcctgacgcccttctcttccgtgccgccggacgcgcgggccctcgcacttgatgacccttcagcgccatcgcaaacgtcagccgaggcaacggtcgacgtagagattggccgccgcttctggctcaatttgacgcacccggcgttcgtggccgagccaaatcagtacgagctcgagctctcggccggcggcattcgcatctcgcacgcgctactcgacctgggctcgtctgccgacggcgaggcccggccggtcgacgtctggctcgacggcagcggcgagctcggcgccgtcgccttcaactccaaggcagccttgactggtgtcgtcggcgcgtgggagtggatgggcgtggacggtgcgtcttctttcgtgcagtgtgcagatgcagatggaatggagggtcggccgcaggaccctcctccctttatccggccttcgaccatcaggcgtcgcgggtcctgacggactgtcgctgctcgtccatacagccgacgaagacccactcaacgtccagtccgcagcttcgtctggtctgagcggcgcgctcgtcctccgcctgttctccattgccagccgcaaggacggcccggccgctagttcgcaggagccggctccgcgcgtatcgtctcctcctgatgaccgcgatgcgagtcaggtgctcagcgacttcctcgcagctcggacctccgacaagagccggcgggccaaggtcgatctttggtgcggcccaatcctgcgccccttagaagccagcgctgctattgctgaccgagactcatcgacttgtcgcgcagcatccggccgcaggacgtctactcttcggtcgagacgccgtcatcctcgcatccgctcaaacctctgcgctcgtcactcaagtcgctcaagccagccgcggcgaccttcgtcctcggtttccggattgcttcgcttgacccgccaaacgttgcggcgaccgagcccgaatcggcacctcactcgctcgaaggggcggccagcacggcgacgcatggccatccaacaccgccgccctcggcccgcaatcgctcgactccgtcatcggcctcggcaacttattcgcgcaaggagagcaagaagcgcgcccgcgccaggagagccgagagcgtctcgtcggcttcggatacggccgagggcagcactccgaaccagcaggagacgttccagccggtgacgccactcccgcgcggcgccgccaaaccgtcgagcgcgaaagagacgaaggctgccttctcaagtgcttccaggctgccgggccaagccagcatcagctccgagcagacgagttcggccggtaccaagcggcggaagacggttcagacggcacccgttctaccggcaacgagccctccggtgggctcgggcaggggtcctctttctacgccgacggccggccggccgagctccgccagcaaggctacggccggaagccccacctcgacgaacgcaagtcggcgcaagaaggatccgtcggcggatccgatgcagctcgtcgcatcgggtgacgagatggacgacgagatccaggtcgtcgaggtgctctcgaccgtccaagccgtaaaacgcaccaaatccctcgacaagcctcaaggtctgtcgtcgcctgacttgcagatgcacggccggccggcgcgccggacgctcaagtctagcaacggctcgtccgctgcccagccaaaggacgtccaccagggcctgctcgttctcggcgacagcgagctgttcgagcaagccgacgctggcaaggactctgccgccgcttttgatgagctgctcaacgccagcgggatcgatttcgacgagtttgtccctgcgcccaacaacctcttttcgtcggccgagcgtccgcccgcttcgcaggcgaacgaaacttacacctcgtctgccgtcaccgccgggccttccggcgcctcgacccagggggccgtcgtcgagagccagtcggctgccggagaagagctcgatctcgactacgcggcctttttcacgacgcagagcggcgaagcgcaagggcccagcctccgcgacgacgcgccatcgacctttgccggcgccgatgctcaggctcgaagtgccgctggcgtcaaccattcatcgcgctttggcgagctcgctccagaggtcaaggacgagagcgagggccccgtctctgctccacgcgtccgcccagaccacgcctcccccaccgagggcaaggtcgaaggcagcgaccgggagcccagcccgatcgagatggacggagtcaacctgccgcccctcgaccgcgatatctgggtatgtccgctatgcccgcgctctgccgctctcgatcgagcgacgcacgacgctgacaggctgcttctgcatcttccaggtcagcgtccacgaatctatcgacaacgccgttaaccaggcgacgaagaatttgacgcacgaggcatgcaagatcgacttcgacctcctccggcgtttcaaaatcgatctcagcgtgcgtgtttgcctctgcggaacgccagcgagctgcgccgtcctgactgtgcaatcctttaccggctgtctccgctcgcaggacgagctgaatgcgatccgcaataagctctacgagggctgccaggccatcgtcattaccggggctttcggtcttctgccgtcgctatcggccgttccattcgagccggccccaatgcaggacgccctgcccgtgcacatgtcggatttgcgtgaggcccttcaccgcatcatcttcaacgcgacggtccggcacaaaaccgatctttacaaccgcttccagtcggtctgggaacccagcttcccgggcgacgtcctctcgatcgtcgagaagcagcacgaggagacggtccaagcgatgcgcgaaaaggttgcccaggccctccgtgcgatccagcgcgggaggtaggggccctccagcgttgtccggcccgtcgattctctcctccaaggcatcccttcctctttatctttcatcatcaatcttcggtcgccggctccgtctcgccggcaccccgctcttgccgcctcatgccctccgctttacctcaacgatctcgacgacccaatcacgaccacgatctccccctcctccctgtccctgctcgcgcctgtgcccggttgcagaagtcgctcgaagcatcaccctcccccatgcatgcccacctcttcactacctcttcgttgcaattctgagccatattggagcgacagtcaagtccactatcatcagagcaaagtggtggcctgaggtgactcgaacgcctcgatcggcacccgcctgtctgccggtgttgttcgtccccctttcgcctacgccctctatcctcttgcatccagctcacccttgctgattcttgcccccccccccccccccccccccccccccccccccccccccccccccccgccgcctcggccagcccgccggccgaacagccgaacggcgccgacttgcggccgaccgctccggcaaggcggctcaactggtgcgtcctctagagccgcacgcttaacgtaccagcaggccggatgggacgcgcgaaaggccggccgtccaggccgcgcgcgaggttgacaagagtcaaggacgaccgtcgggcctgtcgtcggccggtagccgtcgagcgtttttggctagcgctaatgcagctgacccgatgtgcgcgacatgcgggtctagagaggagtgatcgaggatggtcagtgctgatcctctcacgtacgtccgctgcggtcggaaccacccttcgccacacgcaagcctgccccctcgacccgcgactgctgttgtgcgccgacgcgaacgtcgcctcgaacgagttgcggtggcggttcgcgtcgtcgcatcgggccctgatcgacacggcaggaccagacaaatccggcgggccgacttgctaacgagcggtgcaggcccgcggcggctcatgctagtcaggcgacaatgggtcggcgtttgagcccgagcgacggcggcagctgcgcatctgggcaggatcagaaggtgaggagaggtggagatgggtcgaggatgtacgaggaagtcggccaaggctgatgggacgctctgccaccatctcacgaccgggcatcgtctcgtgcacgcgccgtgagcaagcgtcggcctgctgcggcgaatcgtccggtcggtcgagatgagaatcagcgcagacacttgcagttcgagcaagtgtagggacgtcaggtcagtctgggtgaccgactgctgctgctgatcgggcccaacaaggcagccaggcgagggcaggcagacgatggtacgcacgacggtgccttgtgaacttgtccttgcttgcaagatttcactctgacgttgaccgagtgcgctgacctgcggatggggcaagacctgatcagtaggagggccctcgacttgcgcctcgctcgacgggaccatacgcactgaccgcttcttctgacggaccgcaggtgttgactgagggcggtctggacgaggtcaaaatgagggggcggagttggcgaggtggacgtgcgccggaggacgggtggcgtttgagcacgatgcagcaagagcgacaccctcgaaggcgggactagggcagtctggaagcagacggcgggacgggaagactgtcagcagggaaaccggcgggacgaaggggctttcgaagaggcgacaagggagagtcgacggagattcgctcaggtcgccgccgccgtcgaaaggacggcaggcccgacgactccttttctctcgtctcacctcggttaggctcaccatctgggggtcggtcctggctgatacttgcgtacgctgtcgatgctcgtcccttgtttgccgcctgctgtggtccgacggacgatgtggcgaggcggacgaagggacgctcgtcatctgctccgcctacgccgcccgcgccggcgcggtgcctgctgcacctggagctcttgccgcctcgtctaccccttgaccgtcatctcgccgacacatctcgcccgccatgtctttcaagcggccggcccacatcacgaccatctccccgatgcgttcctctggtgagcctcgcaagccccttgcgagcgtcgtgagcttctgccgcgttctgggcgctgcgctgaccctccattcgcgtcacctcgctcgcgtgccagaccggagaaagctcgtcgccgccgtcgcagagcagtatggcctgtcggccgacaaggccaaggagctcgtgccggatgggctccagtcggctaggttccacacccacctcgacacgcccggagtccgtttgatcggacgcctgcttcgtctgactaccgctgggcccgctcggctgacctttcccctggcttgtgctcgccaggtgctctacttctcggccagtccagcgacggccaacccgctctggctctcgctcctgacgtctaagcagagcagcggcgcgatcccgctcctccacccgaccgtttacacgctgctcgcccacccggcgctgatcgagaccgtcacgacccacccgcacgtcatcagccgcctgatttccggtagcgacctgatgcttcctgggctcgccggtccgccgtcgagtgccgacctccggccgggcgacatgattggcatcaaggcgaccggctcggacgagatccttggcgtcggccggtgcgcggtcgcgagcgccgacatgaagcgcagccggaagggcaaagctgtcgagatgatccactgctggaaggataggtgggctcggccttgaagctctaatctacgctctcgtgctgacgttctcaaatcctgcgtgcagcctctgggaggtcggcaaggaccagcggccgatctccttctccctgcctaaggaaggcgagaacggcgagtttctctcgtctagcgacgacgacgacgaggccgaggctgtcggcgcccagctcacaaagacgaagctcgacaaccctagaccgacgcccgaggctcagccctctgcgccacccgttgctgaggttcagacgctcttgccgcagggtcccgccccctccgttcgacccctgtataaaataaggaggctgactccccctctcatcctttccttggctttacagaggtcgagacagtcctccggctcgccttgctacagtacctgacgacgctccttccggcgccggcaccgggcctgttccccattccgtcgtcgaccttctatgagcgccacatcctgcccttccgcccgtcatgggcgccgtcgcaggcggccgtcatccagaagacgtcgtacaagaaggttggtaagtggctcaaggcgatggagaaggagggtctagtaaagctcaagagcggcaaggatcaggactcggtcgtctctgccgatctcaagcacgcggccgtccagggccacaagccgcacgtgacgacggccgagtcgctcctcaaggacaagaagaaggcggcgcgggaggcggctgccagtgggaccgtcgcgtttggctcggcagacgccagtaaggatggagttccgccagccgtcaagcgtgccaaggtcaaggcgatccgcgaggtgttcaagccgagcggttcgacgctgccgttctgggcagctctttcggtcaggtgcgtctgtcatgggtcgtcatcgcgctctccctgcctgatgctgacgataaacctattaccagccccgacaccatgctcacggcccaggacgtccgcaaccacctccaggcctacatcaccgcccacacgacaatcccgcgcgaccagagcatcgtctatctcgacgacctcctcaagaaagccgtcctctccaagaacgaggatggcatgatccggatccaaaaggccgaccttgagaagcggctgcgcggcaagatgatcgagttcttcgccattgaccgcgtggacgaggagggcgctatgaagcaagtttccgccagccgtgcttctcccggcgtttagctgactcttacccagctcggccgtcctcaggaagggcacccctgcttctatccacatcgctggcaagaagcgagcgtcgaagcacgtcacactggtcaccggcctcgagacgtttggcatcgacccaaagagtaggtgtctctatcgcatagcatcgactgcttgcacacggcgcttacacccctctcgctcgtgcaggcttcgcggacgacctcaagcggctctgcgcgagctcgactggaggtcagctgctttctgcatgtgctctggtcgccgggttgaagggctgctgatctgtcattctctcgcctgcagtgtcgccgctcacctcggcatcccctaaggcaatgctgtcagaggtcctcgtccaagtcagccttccggcctcgtgttctcgatcgcagaccggtgctgaccttgcctcctgaccatcatctgatctgcagggcacgcacgacaagatcgtggccgatctgctcgtcaacgagcacggcatccctcgcaagtggatcgtggtcgataagggcagatagatgggctcctcgctcaagttccgaggaaggaagggtctgagcgtcggccggccgctgatcaggctgacggatcaaaaggagaccgtcgggaggctgacccgtgggggatccgggtggcgttccaggtcgatcaaagggaagtaactgagcgatcgagcgaggcgactcacccttcgggtcgtcgctctcgcccacaacgaatcccttccctcatcgaatcctttctcgaccctactcaacgcgctcaatctacgccgcacgcgtggccagaggaagacgatgtcgagtaggagctgacaccgacgcagaccgcgctaagcgcaacgctgatggcgaccggtcgttagacgtcctttctcgccaacgcccatctccagctctcacctctctgaccacccagtcgcctcgcttctgcctgcctgtcttctgcttcacgctgaagtcgtccgtccatactctcggtgtccaacatagctcgtcggcgcccaccccgcctttcacctgacccttctccattcccctcccggcagcctgacccacacgtcgccccttccacccgccatgtactcgccagcgtcccccatgagcaaggcctcgacgagcaagccaggtacgtgcccgagtggatgtgcgctgctcgccagcctagttgacgtaccgcttgctcatactccccgcccctcaggcatccacgacatgaagctcaaccggctccggcagcactgccagcgcttgcgggacgatcttgaccggccgatgatcagcgtgtccgaagcaagcatgtcgtgcgtacctcgcgctcgacggggatcgactcggaagcgagtgctgacgtgggctttctgctgcgcatgtcctctcccagtctcatcaagcatgccgagacgaccagggaccctctcgtcccttcggtctggggcacggtccgaccctccgaggaccccttcgccacccccaagggcgcaggctcggagggaggctgctgtgcgtctcaccctctgcctgtcgttgacggccggcccgctgaccctcttcaacctccgttctttcgcaggctgcatcgcctgagccacagccctcatgcactgccgtcccatgcctcgcttaacatacgatgtctccctttcccttctcttcgaggccctgccgcgtacatcctctcaccgctggatgcggggcgggaaccccgcgcgacgcgcccgaccttgcgcctcgcgcgcgctctgagactgctgcttgcattgtccttcgacctcgtccctctgccctcttgcctcgacccctcccctcttctctctcttttcctctttcagtcgcgcctcccagaagtctcgttgcacgctctagatctctccggtcgactcttcgctggacgagaagtcccggtttaccgacttcagccgcggctcaagcccacgctcgagcgacgcgtcgagctccctcccagccgtccaggcgcctcctgcccactttacgctgggaccccgtgcggattggagctcgaggcggaaagacctccttgccttctcctgttctcggcgccgccctcgatggacccttacagggctatggtgcgtcctcctcttcctcgacagcgttggcttggcgctcagtcgcgcagagctcccctcctcgacctcgaacgacttgcctgggctcgcctcacaggtatgctgacgagctgttctgatcatcactctcagccctcgccgacgaccagtcggtttccggccggcgctcggggcggcaactttctgccgcccgtctctggcccgccgacgccgaatcgcatgcagatgcgccgaccgtcccagacggtgtcgccctcggcacgcgacgccctggcctcgtcctcgcatgtgccgagccacagtccaagcgtcacatcggcgaggtcgccaggcccgagctttgtcgaccagcagtccaacctagcgctcggctcgccgccagtttggcggagggagagcgaacagggtcccgaccggacgagggtcgaccagctgagtctaaacggcccgccaggaacgccggcacggaaaggctcggtcggcatggactacggcagtgttgagaggagcccgggctacggcctcggtatcagctcgccatcgtctgcagcagggccctcccagctctcggccggccccggaggctcgccacagccgccgcctcgcatgtctcgcataccgagcagggagcgcatgcaggccagcctgtcgccccgggtgccttactctcagccaagccctcggccgtcgtcggtcgcctcgccgacgtcttcgccttaccagcagcaccacgccaagtcgccgtcggtgccgctcttgcacttcccgccggacccagcgcgtcggccgcaggacaggcagatgagcaaccccaatcttcgcgcgcatgagaacgccgctcggcgaggcatgtcggtcggcgatgatcggacgtgctcctttggcagtccatctggcagccgggtggccgccggcggcgagcgcaagatctcggtctcgctcgagcgcgacggcagcgacccggctatttcgattcctctgagccaatatccgtcggccgtcaacggcaagccggcatcgactcctccggctcgtccgcggcacgcgagcgcagaactcgtcctgcctccgcagccgcgcgacggccgactggcgaccccgccgcacacaacgatcgaccgtgcgcgcgactctcgtctcatttctgggggctcgccggccaagcagctcggggccgcgcgcgtgagcgtcgacgagaatgccggctaccgggcccaactttcggccgaacggcgctctggcagtggcgacgtcggcaagcctcgcctgcctcaggccgagacgccgcccaagaacgtcacgccgcgcaagagctcaggtgtcctgcgcagtctgttcgggaaaaagaaggagtcgccggcaccgtcgcccccggtagttaaatcgtcgccaggctcgagtctcgccggcgggccgttgaccccttcacgaaacagcatgcaacgcgactttgagccgcggtcacgaccgtcaccggtccagccctcgacgacgcctccaaatgggcggatgatgcgtccgagaatcggctcgtcgccgaccgtgcccactgccgccgccgccgtcggtccccccccgcgccgcccttcggccggactagactaccagctctccgcgccgcctccaccacagatccctctgccttcgctgctctcaaccgactcgactggcttgctctcatcgtccgactcgattcagtcattgcagcagcgcgaaggcgccggaaacaagaaggctgttgctcttcttcggcgactctcggaccagtcttcgcactccgcatcgtccctctcgtacctcacttcttcagagccaccaacagcaccggccaacctgccgcacttcaaatcgtctgggtcgctccgcctgctcgccctgcctgactttggcggcagcctcgatctcggagaggacgtcggcaaactcgccgatgcgctgcgccagccggcgttgcccaacggcgacggctcgttccagccgcagctcgatggcgaggactcgtggagctcgctgctcgctgccatgagcagcggctcgcccgaaatgatcagtgctgcattcgagggcgctcggcaatcgatcgccatccagaacaacagcgagctcgagaaggccttggccgacctccagctcgaggttaacaagcaggtctcaaacctgcctgcctcacgctcgctcgacctgctggactcggtcgtcccaaagccgccggcgccacctgtcgaagccgtgccctctgcgccgcttccgccgccatcgccacccgctcccaaagcctcggagccggtcaacttccccgtctccttccctccgacttttccgcccacactggcacctcctttgccgagattcgacttgcccttcggacccccgtcggcgccggtcaagaaccccaacctgaccatcaaggtcgtcaagtcaccgccctcgtctttcaagtccatcgcccagacctcgatcgcgccgctcaaagtcgcgaagcgaacgctctcggcgccgtcagtttcgccggaccagcccacgagcctctactcgccaccgaccaccaacgagtcgctggcgagtccggcagccggcgctgacggcatcgaccagagcggtgtcatgacgtcggccagcctgccgagccttcggacgaaacgcgttcttcggccagcgtcttccagcggccgcgtcctcacgattgctgcggccaggcggcaacggcgccggcagctgctcaactaccgcgtcatggccgaaaagatgggagactgcctctcagcgtgcgttcctgcttgcgaccccctttctcctttgggaccgttactgatagcttgaactttcgacggatgcaacagcgtccgttcatcgtcggcccgcgcaccgctcatccgcggcgtcctgctcccgctgctctacgaggttgagcgttgcggctacgacccgtcgagcctcgccgagaacaagctcatgcgagcgtgctgcttcgagtggctggtcggactcgtgaccaaggacctttggctcgaccacacgccgagcgagcggggcgccatccttgaggccgtcgccacactcgtggagaggtgcgcagtccctccaagccatcttcgtctagtcgacccgttcctgacctcgctcctcgtcttggcctcagcccgacgctgtcggagcgggcgcttgcctctgactcagcagacgcagccgtctttcgcaagatcctccgtacgatcgtctcctttgtcatgatcaagctgagcagcaaaggtccgctcgcctgcatcccttttgagcgtcctgcctccctgctaacgcccgttcgcgtctttcaggcatcttccagaacacgctgagcttcgccgggcgcatgctgggtatgcgttctctccctttccattagctggcagcctccggctgactgaaggcccctctgcatcgcagcctttgccttcttccgcgtcgaaggcatcgctcagcagctcctgacgtcgatgcccatcactcgcatggcccttgtccggatggagacgcagctgctggaggttgaggccaggtcgtgcgtcccccctctctggcattgtcaacatgcgacgccttctggctgaccttcaccatctcatcatctcaggtcccaccatgcccacaggcacgagtcggaggctttccccgccttccttacgcccttctcgatgacagatccccgggcctacgtcgaggagcttggccagacgacgtgcttgttcgacgacccagaggacgaagcggcgttccgctttcagccgggcaactggcttcgtcgctggcaggtgcgtcccttgccttcgcttgtctcctactctagctgatcaacccctcccgtgcaacgtgtcccagtccgacgactcggagctcttcttctccttcttccgcgcctaccatcggcgactgtcgggctactacccttctgtccaggaggccaatgacagcgagagccttatcgcctccatgctcttcagggcaccaggatatgctcgtgcgtacttgtcttacggacgaccttccgttgccgcacgagctgacctcctcgacccgccttcccagaccttgcgaccgtcttcacgagcaagtgcgtatcctacgttcagggcaagatcaactcagtgacgacaacctcgaacgcggcaaccttcaactcgaccgagatggcgggctttgccagcagctcgggcaagcctcccgtcctcgaaagcgccaaccggcgcctgagcgagaccgtcatcctcctgctcggcagcccgacaatcgtcgacctcgaatacggcacagaggtcggcggcgcccggctctttggccgcgtcagcgagctctggttccgcatcctcgtcggccggaccaacatgtacgaaccgaagggcgtcttgtgagtcttgcctcgtctgtggtccggcctcgaaacggccgatcgctgaccttccgcgacctctcccttcagctgcctgttcgacctcctcgacgtcgtcacttcggtcccgcctgatccttacaaggagatgccgctcgtcgcctcgccgccgctcgcctttacgaccgtctttctcatggcgcctctcggcattctcctccgcaacagcgaccacgccctcacgctctgcaaagccatctcgtacgtcttccagcactgggacgcgctcacggccgacttggtcgaccggtcggcgctcctcgacctcttgctcgaccaggtcgtctttgatcggctcgccctcttctggtcgcagtcggtccggtcgtacgtcgtccggctcatagttttccggctctcgcacatcaatcagcgggcggaagggccgactccggccgagatccacatggtcgcgaccttgaacatgcggctcgagcgcatccggcgccggcacgccgatctcgagccgtcggttctcgggtcgttcctcgaggacgactcggcgagctcgctcgcaccgccgccctcgcctggcctcaagaggagccggtcgacgatcgccatggtccgtctgccgtccgagccgagctcgctgtcggacgagtttgcgccgacaagcgaggccgagcttgcccagcgtcctggcgccgaggtcatcaccggcggcgggtcgagctcgggaggcgcggtcggcaaagcaactcagtggttcaagaagagctttggcggcagcaacggcggcaagaagaagcgcggcagcgccgacgacctttcgagccaggcctcggctaagacgctagccggcatcgccgaggacacctcggaaggcacgccgagccccatctcgcccaccacctctctccctccgcgatcaccctcggcgaccaagacgcagcatccgccgcttttctccgcgctgccgagtcccgttcgagcggacgtgccgtccccggcgcgatcgtccttcgagtcgagtggccagccgtcgccggcagacttcttcttctccgaggccgaggagcggaagctcgctgcggccgatgcctaccaaccctcgggcctggccctccctggccctttgctgccgcgcaacaaccccttcatcaacgcagccctccagcccggtctcgactcgccaacgtcgtcgctcgcgagctacacctttgggagccgcggtagcgtcgattcgacctactcgtcctcggggacaatcaccccgacgacgagcgccgcccagtcgcccgggaacaacacgaccggcgtctttacctttggctttgctcagtcgccgctgtccgattcgttcgagatcaacgcctcgtcgccggccgtgccgacgatcgtcctgccaccgggccagggctcctcgccctcgcctatgtcgccgacctccaatcgcatgagccgctcgttctctcgccggtcgacgcttctcaccccgctcgcctcgcacatcctcgaagacctggccaacaccggcgaggacgcctcgcgcatcgccgcctcctctgcggcacagaaggagaaggacgtcggctacgaccgcaagctccacccgtacgcggtccagtttctcgccgagcttgagctcacgatggaggaatatgcagagtgcgttgctgccgtgtgctgtgcccgagagaccttgtggctgaccgagcgcttcctctgcaggtggtacggaccctctggggccggcactctctccatcgatggtgcccctcctcgcctgagcgtgggctggtgagtcgtacgctgcctttcagccctggcgggaccacagagatgctgacgaaattgcccttgccaggtccttccacgacgcggacgaatgagccggccctctactttgcactgcctgccttgctcctccggtcccatccgtttctgtctgtcactgtatcacccgtcacttccatatctgttccgcccttttatttgcactgcgccgcctgcctgccttctgctttatctgctgggcctcgacgcacacgtcgccggcccctctcccacctattcatatctgcatggtccttcgtcccgtcttgctagcgtcggcgcatggccattcaaggagcgagggcgagggcgggtgatgagagcggaggtgggcgaggagggcgcaggcgggcgaaggggacagcgagggcttagagagcaacccagaggctagcaacggcgagcaaggccccgacgagggcgacgtggtcgacgctacaggcgacggaccggaggccgccatttccaaccgaggtcgatgaggcggtcgccccagtgtgtgtaccgaatgccgacgggttgaaggtccgagtggcggtcgaggtcggaagcgtcggcacagacgtcaccgaggggtccgacgagtagacgttcaggaagccgatctcaaagtacgccgtgtcgaaagcgctgtcgccgttgaggacgtaggtcgtgtcttgtcgtaggaggcgaggacagtcagtcgtctggaggagttgccgtcctcgctggtgactgacagcaggtctcgggagggatcggcgcctcgcatccggtcgagcgaagcgtgtcggccgagcctgcccagacctggaaggagagagaagggtgcgtcagaccgagtcgcacgaaaggggggagcagaggagagcggtcgcttactccgcactacagattgacggaaagtgaagggagtcaggaccaaggaacgcgttctcgcaacgagcaagtgcagcgatgtactaaggcgatgttgatgacagcctgctgcgagtgcaggtagcgcgagatgggcgcgcagcctttggccggccagtgcgccgacggaaggccgagcgtcgccgggtcgatcgatgtcgcctcggccgtcagcgagggcgggatgtcctgccgctcgatgaaccagatcgagacgcccgagctggccagctcggtgacccagacgccgccaccgtttagagcaaatgcttcgccgtaggaccggtcgctacgctcgccgaccgtgcagccggacgaggtgttgcagttctgcatgccgattgtgcccgtcatttgcgaagggaggttttctggaacgcagcccgccactgtgtgcagggcgtactgattccggacttgccggttcacgccctcgtttggcgcgcagcaggaaaggtcagcggtgcgagaggtcagagacagtcgacatggctcacctcaaagatgtcctgttcgcctccttcaggccaggttccactttgtgaccagaaggccggccactgagaacatccgtacggtacgtgacgagcatcgaagacccagacggtaccgacgttgtaagcggagcgggaagtcaaccggacgctcagcctcttgttgtcgtagacgacttttccggtgtcgacctgaagggaagcgaagatgagtcagcattgcgctgttgccatcctaccctgccagctgcttgtgccgaccttcacgatggcgttcccgcttgcggcaatgtacgccaggggcggcgtgtggctcgagttgacgtagacggtgtctccggaagtcaaattgtcgtagtgatcgtaccagtcaaagttactgctcacgttcaggcgacagtcggtcagacgaaacgtccacaggagttcggccttggaggaggggcaagggggggtgaaggcggggagctcacttgaagaatgtgaggcccttgttcgactcgacgagcgagtagagggcgccttctacgatcccgatgcccagggacgcagcgagcaacgaggagatccgcatctgatgcccgtgggaggaggagggaaggaggttcgacagggggtcgaccgcggcggggctcggctggctgtctccaggcgcgaaggtaggcgaggcgtgatgaggagggtcagcaatcggctgaagggtgcagcagtggactaggagccgagcctacagccgtgggcttggctggcgaggtcgtcgtcgagagggaagagcgcccgcgccggcagaaagaggtcaaggcagagggttgctgcgcgccaggccgagcaaggcgggccggacttgaccagcatcgttgcctgccacccgaggtcagtgtcggcaagttgcacgattgcaaagctgaccttcgggctgacacgtaggaaagtgtcagcaggcccggaagagcgagctagaaggaggggggggggggctgacaccaagtagcgacgatgccatcgcgagctcgacgtcgggcaagagcgacgggccggcagctctaaggagctcagcctcgaccgggttatcatgctctcctcttctcctttcccctcgactgctcgatgacttcaggcacgccctcggacgaccctccgcggctcagagtcgccatcgtcggcggtggtatcgccggcgcgacgctctggctcgcgctcaaggacgtcgccagggtcgagctgaccgtctacgacggcgcccgcgagctccggtgcgtgcctcgctcctcgccggtctcgctggtcgagggtcctgtcgctttgcactcgtgctgacgatggcgctgcgacctcagggagatcggggcttccatcgctcttcagccgtgcggcctccgtatcctcgagaagctcggcgtcgggcccgaggtcgaagccgtcgcctaccgagggccgaacccggcctcgatggtgcgtttcaacgtccgacgaccttgggttcgagtacgctcctgaccttgctcttgtcgtcgtagatctatcggtcagagatccactggcccaggttgagcgagccgggtgctcttgactgacatccagcgcgctgcgctgcctccgcgcagaaaccatcgcacggccgaattcatagccgctcctccgccaacgagtgagccctctctctctgtcaagaacagtgcgcttcccgttctcatctcggccctcgtttgcaggactgcctgagcctcgacaccggaccgctcgcttcttccgcccgcacctccaccagatcttgaccgccaagatcccgcccacgcacctgcggcttggtaaaaagctggcctcgatatatgactcacctggcgagcccatcgtgctcgcgttccaggacggctcgagcgccaattgtgacctgctcgtcggctgtaagttgctcttgtgacatcacccgctagcgcctccagtactgacattgctctcgcctgcaggcgacggcatcaagagcgccgtccgtcaacactacttgcccggctacgagctcgagattggacgcgctttcactcttcgatcctcgttcccgtcgagcaggctcgaaagcatgccagactttccgaccgactccgcgtgagcgcgccgcctcgggtctttacaggggaagcttgtcggctaacagcccgcccgagcttccctgcttgacagacactggtggggtcctgatcgagcattttttacatcgcctctcggtgcgtaggcgccttgccagctgccgagtcggctgctgaccttcaacaccccgccatctcagccaagggcatcttttccttcgtggcctttgtgcccgacgcggtccttcgagcgaggtcgggcgacagttcccacgtcgatgccaagtgggacgaggcggggagcgtcactgcactgagggagatgtacaaggtacgactattcctgctcattgccctttgtcgctggcgctgaccggtaagcgccctccaggactggcatcccatcattcgagccgtctgcgacgcagccgatgaggtccggtgctaccctgactatcacggctcaccgctggcgcggatggacatgccgtcaggacgcgctgtgctcctcggtgacgctggtcacccgcacggtctgtcgtcctgccgctcttctgacctttagcaacccgagttgatgactcatcgacctctgtacaacaggtggcgcatttgcagtcggcggatccctcgcgatcgaggacgcctacgccctcgccctctgcatccgacacacggtcgcctcgccctcaaccctgccgctgccagcggcgcttggcctcttctccgacatccggaccagccacgtcaacaaggtcgtcgcggctgcgctcagcgtccggcaggccaaggaccgaagaagcgacctggatatccggatgaccgaggacgagatcaggagggccgtgctcgagcgggtcgagaccgagtggatcggcgagaacgacgtcgagcgcgactttgcgcagctcgtcgcttgtttagagccgaggctgccgtgagcttgagatcaggcaaaatggcctctcctgactgctgtagatgtcctactggtgcctttggcgttagctgcaagtgacccggccgcgagtacgtacggccgcgtgtcactgccggcgatcgggcgcatcggcctcgttcgctcctgcgtcactctcccctcgaccttcgacgacgacccttcttcttcctctcttgtgctcgtcttttcctccccaatctcgacctgctgccccgcgtgtaagctatcgctgttccggatcggccagacccttcaaagcacctcccgccgccaaccaagctcgccgcctcgccgtcgacgtcacccaccacctccttgcccttggctctctgtctcggcccgactgtcccttcctcgatcgctcccgctttgtactctctctgtctctctggcttcccgtgtgacttatctcatggtctttggaccggacaagcctcctcgccctgagccctgcttcgaggactggggaccgccaaggaggcttctcgcattgagtcttactcgctcgatcaaagggtcggccgaacctcctgcacaaatatggcggccaacaaaggcagcagcctgcgaatcgagtgctcggagaagacgcagacgagcggtggaagggacatcgagatcttgcgaggaaagcgcagaacgcgccgcgtgcgagcagagagggatcaagggggtcgtgaagaacgtcaaggaagcggccgagtcatatacgggtttgccgaaagaaattgaagcgacaaatgttgtccgttgttgctgcgggcggggcatggctcagcaggcacacatgcctgagctcgtgccggcgtggtcggcatcgcctccgtcagcgacgcggatgacgtcggacgtccctgcagcctgggcaccgtccgctcgcggcgtcttggtgtagagcgagggcgttgcgaggatctgtttggagggcaaggcctcataatagtcagtacggaggcaaggatgaggctagagaatcttcgaaggacggaggaaaagacggacctgcttgacgagatcctcaaaggcggtcttgacaccgaagttggtcttggccgagcattctgtaaagagaaccgcgagccatcaggtcagcgctgacgacctctgaagtatatgcgagtgcgcaagaagggcgctgaccgatgaagtggcaattcatgcgttcggcaaacgcctttccctcggccgtcgtcacctgcctcgaaaactccttgtcgaccttgttgccgacgacggccttgacgacctcggatgccgtgtacgtctcgagctcgtgaaaccagcgcgtaagctcttcgaacgtcggtcgggaagagacgtcgtagactgcgggacagtcgacaaaggcgaaggaagggagtcagggaagacgttcgagcgagcgcgttcgagcgagaaagataggacagaccgaggatgacgccttgggcacctgcagcgagaagtgacggatgtcggccggcgtggtcagctggatgttggcagcaaggagcggacggaggcggacggacctcggtagtacgacgaggtgagcgtccggaagcgctcttggccagccgtatcctgccgtgcaacgcatcgatgcatagccaagggaagtcggtcattcgaggaaactgctgagagtggctgccaggcagaagacgcacccagatgctgagcttaaccttgcggccgtcgacctccatcgacttgaccttgctgcgggcgggcgagtcgcacaggcacgagccagctcggtcgtcagcccacacgtcacgtcacgctcgctcgcagccgccctccatcagaccatccggacctgcaggcgacaagcaaaagacgcacaagtcgacaccgatcgtgctcgtcgttgcgtcctcgggtaggtactcgtcgtcggtgaagcggaggaggagcgagctctttccgaccgaggcgttgccgatcaggaggagcttgaggttcggcgggggcggcagcggcgcgggtgtcggcgcttggtcggccatcgtgagggcagagcaagagtattttgtgttgctgcgagtgtcgagctaaactaggtctctttgggatggatgtggcgagggagagagtcggtcggtggtcgagtgggctcaagcaggcaggatgacgagtcgtcgcgcggccgggccgttcgccggggagcctttcgccctgccagccgacccaacccgcctcacctcaacctcctcggacgaaggacagctctcgcaacctgtataagagctatctgctcgccttcccatgttgtccggctctcttttggctgaagatcgtcttgccccgctgcgagtcgaggacgacggtcggccctgccgcgcagcaacgacggcgcgacagacgcgaagcgagtcgggacagctcgcgccttccctcctttccgtttcgaccataacacagcgaccgatggattcgcctagccatacggagcgctcggatgactcgcacgccttcatcccgactgccgtaacagcgagccccgacggccgaccggccgcagcgggaccagccgccacgagctcgaccagccggcccgacctcgtcggctcgcgtccgccatcgaccgcccaagcgatgcttcactcgccgcctccagccgcctctgcacgcctcgtggcgcgcgagaacaaggaggtcgaaaacgacgagctcaagcagacggctgctcggctgctcggtctcgacaacggtgctcggccaaaactcgctgccgcgacgccaggcgcggcaggaggttcgagcagtcagggctcgacgaccggcaagcagctcccagccatcctcggcctcggcgtgagtcctaaatagcggcagtatcgcatctttacggtctgctgaacctcatctgcgtcgtatctgtcagcctcctccagttcttaccgccagacagcctctccggcagacgtcctcctcctcggccatccccctttcgagcccctctggtgcagccggcaacgactcagccaccctctctgccgcctctgagctccctgcccgtgctccatccgctttgcctacgccgccgtcagccaacattttcgccatccctgtcaagccgttctcaccgctctgtacaccaagcccaggccgaccacggcgccgcaccatcggccggtcgccgatcgccggctcctcgagcgccacttcgtccagagcagcgccagtcagcatgggcccgccgctctccatcttcggaacaggcaccgccaaggacatcacgcttgatgaggacccattcgcgccctcgaccgcgacctccgcgcgacacgcagccgtcatgtcctcggccgggagcacgcccggctgtcactcgacgaagacgttcgactcagactcgtcgacgtcagactctgaggacgagccgtttccgtacccgcaccacctccggacgaggcagaatcacacgttgccctatccaagcgggcacggctcgccctcgtcggcggcggcgggccccggcgtcgtcgtctcgcatcgtcatcaggcgtcgctgccacaagactttgtcttcagctcgcccatgtcgtcctcctctggcggctcgtcatccaacgcgcccgacccagactcgacgctccctcacggctcgagccctcagcggccacccgtcgctcagccgccgccgtcccatcgtggctcagccctccccaagcggtccttcgcaaggagcatctcgcagcccgagcgttcgaacattcttgaacggccgccggcgttcaacagcttcgtgccagatcttccgtcataccgcgaagcctcggtctccggctcgacattaacggcgcacccgtccaacggcatgtctcgtgccaagcagccttccgaaagagttgccgcagacggagcctcgagtcgccatcgtatccctggcgcgcgggcgacgagcctaacgatgcagcgcgcgcagcgggaggcgctcgaagaaagagaggagcagggtcggactgcactggctacgccgccggcggtgtcgtcaccacctttgcctgcaccggacgacgagcgccttggtcagggtgaggtcgacgcccgctcgactgccacgacgtcagccgacgagcgtcatgagctcctcgtaagtctttcgactcctcaaccgaaactaccccatccagacgctgatccgtcccatctttgccctgacagatccgtccgctcggcctgctcgctctaagtcaagccctcagcgcggccaacgacgaagttgccaccttgcgctcgaccgtccgcgagacggccagcctcgtcgtcgaccaggcgtactggcttacacaggcagcaggcgccgtccaagcccagggcggcctggctcctcctccgccatcggaggccagccggtgtaatgccaaggagcttgcagagatcgacgagctgagcgggaccgaggcgcgcgaggctctgaaggtgcgtcctgtcatacttctgcaggtcgcgcgcgccgctcctgcgacacttgactgacacccttttcaatggactttgcgtgaagatcgtcgcctcgacgacgaccaagtcgctcgtggccatttcgctcgtccggacgatccacgctctcgtccactctgggccagcggcaggcgtggaacgcactcctccgacggaggatgacgtcgagatcttcaccgacgagaacctcagcatgctcgaagggacgctcgtcgcctggcggcgcatggcgcacgctggcgtactggcatcgatgatgtcgggcgcccgggatgcacagcagtgaggaagggaggctgcccaggggggaggaaagacgatctgcttcacgacacgaccatatcatgactacttacgctctggcatcaccgtcgctcatcctggctggccgcttgtcagggagagttgaggcacgccagccgacgacaagagtaacgaggcgcgccgggcagcacaacggcagcaggacttctccgcccgcctgccaacgcttaccctcgtcctcctcgcctccgtcgtccagcctataccgacagcggcacaagccccttcaagatgaccgccaacccagcctgcttccctgccttcaacccgcgcccgccatcgccgacccagcacgcgctcacgtcgacgttgaacgacccgagctcggccgtcctgaccgttcggtgcgcagccctctctctcaattcgtatcgtccgccgccgacggctcccagtcaggccgcaaggaggagctgatgagaagcgtccgcgctgaatgtcggcgctgcagcgtcgtcaagagctttccgtatcgcacgatgaaggctctcgtcctcaagaacgtcgacctgctcgaggcaggcggcgtcggcaagctccgcgagcgctgcctcaagggtgcgtccccttcgcttcctctcgctcttgctagcccgtagctaagaggctctttcgctcctgctccaacgtagagatcccgacggcgccgggcttcaagccgttcaggacgtgcaccgacagtgcttaggccggcgccagcgtctctctaaactaagaccgccgacgcgttgaggtcgagctgacctcttcacttctccctgccgccctcaagagctcgacaccctcaagatctacgtcggcgctcatcagaacaaggtaagctataccttggcctgccagctcgctcagaaaccagatgctgaagctcgagcttacccccgcctcgccagacaatgaacctcatcatcaacctcgacaaggacgagacgctcatcctccccgctgagtctgaagcctcgctcgcctccttcggaatcggtgcgtactacagcgtccgagtttcgaactcggaatgcaggcatctgacacggtgcttgaccgacctctcgcagtcaacgagcatgagctcagcttgttcaacctggccgagtacaaggagtttcagaaggatcccgaggtgcgtcctagcgccggtgagcctgtggctttgatatctgctgctgacagttcgacctgatctaccgaccgccagatcaagtgggatgcgtagcccagcgtaagctagcccaacgaagtcgccgttactcgagcaggcgcaacgcacgtctgcgatcgccccagccgagcctagccggcgcgcttcggttgaccgaaaaggtccctcagtggctgcttgcgcaaccagatgctaaggagcagcacaatctgctagtcatgcccggacggcagccggcggccagcccatgcctgtcgtgtagtcagcgcggcaacactgaaattcgatgcgatctaccctatccccgtctcactcagcgctctcgtggtagcagaagagacgagccatcgaagattccggggtcggcaacaagaggagaaagcaagagtgggcaaaacgagatgaggagatagtacaggaacggcgtgagaccccggcagtagcgccggtcgcggggcgacatgaaggagaaggcagaggacgaaaggcagaggcgagtgggcagggatcgtatcgaatgcgcggagagggagcagagatgcgagtggggattgggcttggatgttcaggcgaggacggtcgaaacgggagcgtccttggcgaggctgtcgacggccatcggcttaggctcaggaccggcttgatccgagggcgactcggtcggtgagtcggtcgttgtctctgcaacactggccatggccggcgtctcgtcgaagaagccgctgtcggtccggctgccagagccggcgccgtcgagcgagatccgcggcttctttcgcggccgctccttgccgatcccgccactggcaagcacgggcaccgtcgtcgtcgccgttgaggcggccgatgacgagctctgggcctttggcccgaccgcccagctaccgcgacgcttcttcaggctcccgatcagcaggttgtcgtcgggcgtgccaaacgtgttgctgtggaggtggtcccactggccgccgggcgtcgccggcgcgaggccgagcgagcgtgtcaggccgagcgactggggcgacgacaggaccgagagcgacgactgggggggcgacgagccgttcgagagcgagggcgcatcgcgtggggtcgagccaaggtgagcgccgaatgcgccgggcgtgaaccggatcgacttgagaggtgcgacccggtcgtcaccctcagccgtcgtcgacttggagcccgacgacgacttgaagggtgtccgcgtcgacgagacgaccggcgtgtagtcgagcgccgtcatggtcgaggacgattttagcggcgtcggatgccagggtgggagcgtcgtccgcgtcagcgacgagatgagcggcgtcgtcgctgtgatcgaccgacgctggggaatctggggctgggcaaagagcgggacgagcggagtcgcatcgcggcgccggttagcggcctgctcctcgacctccttggtcggccgaggcgagtcgtcggtcgtctggaacgctgggctcgaaggcaacatccgaagggccggcgagtgacggccagcaggttccgaagggacctcgccaaagacatcggcctcaatggcggcggcggcggcggccatgctattctctcgcgtcgagcggccctcatcgtcgtcctctaccgccggaccggccggcgtctgcaccgcctgcggccggaatgacgtccgccgagcagcaaacttgccgtacggcgtcacaaatgtgtcacgcacggcggcgccagagggtccgctctcgatccgagcttgcgagctgcctccatggcggccgaagacgggcgacgacgatggcggctggaagggtgacgacgggtgtgggaaggccggcgaccggaggaggtgcgtccgaagcgagccgtcgaccgtcgcggaagggccgtagatcacctggcgcggctcaccctcgacctgactgggcgcctgggacgaggcgccggcgccaccagccccagcgaccctgctgtcttcgtcgtcgcgcggctttgaacggactcgcgaaccagagcgcgatcggcgagccaacgttacgtcgagcaggtcggccgccggcaggagcccatgcgcgggcagaagcgtcgaccggccgctgttgcgccttgcgcccggtgcacgtatcttgccgtcgtcgtcgtcatcgtcgctgtcactgctgagagcgaggtcgtcgtccgggttgggcttgagcgggctgctttgcttgagctgcatgaggagctcggccgcgtctccagcgtcctcgccggccggatgacgcccatgccgaggcctgcttggcgactcgggcgcggccgaggcggaccgggcgggcgagacgagctcgggcgcgagcaagtgggcgtgatggccgcgcagactcgaagggaacgatgaccggcggtagattgtccggccgtgagtcggggcgtgctcagcataatacgcctggccactgctgccgtgcccgtgcgcgagatagtgcgactcgccgaggctaacagcgccagcgggcgagtgactgcgctcgccgctgagcggctcatcgcgcgcaaacgacgaagccgacccgtcaccgtcggtcgtgctgtaggtcggtgcgagagggtagctgtactgctgctgctgatgctgctcgccgtggccggcgtacacgtacggcggataaccaccggagacatggggcggcggagggtagcctgccgacggatagcttccgccgtgagttgccgagatcgagggctgcgggtaggcatactgctggattcgcgcagggggtgggaatggctggccgtatgccgctgccggcgggtaaaagtagggctggtctggatgatgctggtggaagccgccgtgcgagccgtcggccggcgcatggtagaagacgctcgatcgaatatcatggccgtaaggcggccggtcatcgccgtcctcgtcttcatcatcgtcgtcgtaacggcgcgtctcgggcgagacccggccgctgctaccgccgacgcttgggtggtgcgagctttcggcgagctcttcgacgatcgtcgccggcgggctcgtcatccgcccgaggacacctttgcccttgcccttgccgcggcccttccccttgccgccaacgcgagcccggccagccccgccagacgacatgagtccctcaatctcgctctcggactcgccaaagtcgtcctggctgaggtcggccgccgagtcagagtagccaccgccaccgccgccggtcgacgacgcgctcgacgggccggccatgccgccctccttctttgacttgctaggtctatgaaaagtgcgcatgtcagctcagccgccctcttcggagagctcccagagtcgagagacggacctctttgcgccagacggctttttgcccttcttgtcgtcgggctgaccttcccggtcgtcccaccgcgtccgtcgcggctggagcgagagcggaatcttgtgtttgtccttcagatgccggcgccagatcgaccgggcgtggatgccgaggtaggctggcgaagcagagggggagcgcgggtgtaagtcatggggtccactggatcgggagaaggcatgccgggcgtactcttgtcacagatgaagcactcgaagacgacgtcgccgtcaaccttgcccgtgccgttcggtccggggttctgttcgagccaagagcgagcgggtcagccttccgaactcgaccaggacgatcggacggaggcgactcacaaagtcgaaccacttgccctccttgccgaggaccatctgcacgccgtcaatcgtcttgaactcgaggctgaggtcgcccgcccggaggacgcccgacgagccgtcgcccgcgtcgggctcgacgtcgggcgcgggcgcgggctcggccgacggcgccttcttcttcttcttcttagccggctcggccgctggcgtcgacgaggcggcagaagctgagctcgcgcgcttgctaccgctagccttggtcgaagcggccgagcttggtttgccgctcgggactttgcttgacgaggcgacttgctgctgctggcgcgcggcctgagcgccactgctgctgccgctagccaccgccgctggcgccgacgcgcctgccacggtcgccgccgaggacgaagccgggtcgacggcagtcgacgaggacgacgagtgtgggtggagcggcgaggtgtcgagcgacgagtgctgcgagtcgggcagagccttcgtcggtcggaacggagggagatgcgtcccggcggcggccgcggtcgacgacgggcccctctcggcgaggacgaggcgtcgaccgccaaaggcgagcggctcgacgacgggcgctgagcttcgaagcgaagactctggggcgggaggtgagagcggggccgagcgggacgtcgaccgctgcggtccagtcgctgtcgaaccctcgccgatcgggctcgacggggcgagcaggagggactgtccgccgctggtcgctgagcctgctgccggcgggtcgccagtcgcgctgccggtcgactttgtccaacgcgggccggccatcgaaggcgaggggttgagcagcgggtcgagcgacgacggtacgcggccggtcggcggaggcggcgcgtgggcaggcgtcttctgctgctggggcggcgcgccggccccctctggcagctggcctgaagccgccgtgctgctgctgctcgcgacggtgctaaagccaagcgaggcccgggtcgagcgcgtacgggattccatgcagaagagcgcgggtaggtgtgaggagaaggaagagggagagagagaggcgccggacagggcaagggccggaagggcttctctcgaggtcgatgacgagccggagagagagggcggccgcacgcgctggacaggagctccctctgccggcggttctggttggtggccggatggatcgagcgagaggggctgcgaggtgcccgagctcgggtcgtgtgtgcttgcttgtctgggtgtctgctgcctggctttggggcagagcaggaagggcaaaggtcgaggtcggcggcagacagaggcaacgcagagagagacgcgtcgaatcggcgacgcgccgcggccagccaggccagtgcagaaaggccccagccgacagggccacggctgccaacgacgacccatggctatcgggaaaggacaggaccctgctctcatccaccgtcaagccaacactcgctcactggtagagggctagactaacctttgcgctgaccggtcgacggtctctaacggcaggcggccgcgcgccgcgcgccagctctctgttgttgctctcgtcgcgagcaacatgcgatccaagaggaggccaatgtcgggccgagaccggcttggaggtcgctcgcatgatctgacttgcaaggtcgccatgactggccgtcggtagatcggtcccgggcgacaccggctcgctcgactgggcgaggatcgcgaggtcgtcctcctcccagctcccctctccctccccatctctcggccgtctcgcatccctccatctctcgcgccgcccaaccagagccatgtcgacccagcccatctctctctcggccgcctcgccccacgcagccctgatcctcgcccacgccggcgtctacgcaaaggtcctcggcctcaccgtctctgtccgctcggtgcgggccggccaaaatcggcgcgggctgggcccggaggacgtcgctttgctgcggcttgtcgaccgggtcgggggtcgaggggcggggatgtttatccttggcggcgatagggcagagtgggctcttaccgcagaggaggatggggacaaggacaagaacgtcgacgacgccgctgacgacgaagacgacgaccggcaccgacggcactggacagtcgagccttcggatggtcgaacaagcgcggccgggctcgcacttgccacgctcccgcttgcgcttttgcttcgaccaccagcgttgttgactgggaagccgtcgatgggttgctcgctccgctgcgccagcgacgactcggatgaggacgacatctgcggccgctctccagaccggcccttcagccctccactctcgcctcctttgccggcctcatcacctccgaagctcgctaaatgggaccgccttccggtctgcccgccgcgcctcggatcgacctgcggcactcgtctgaagcttccactcagtctggccatcaacggcgggtcgacctcggtcggctcaacgtacccttctacggcctacctctcactcatcctcctaccgttcctcgccgcacactggccgacggcagcggcgtctatcgagctcttagtcgaccgaatgggcttcgccccggctggtggaggcgtcctctccctcctcgtcgacgccagcggcagcccaatcgatccctcgacgcgaccgacgccggcgctcggcccgatcgtcctcctcgagcgtggccagctcgtccgaatcgaggcccacatcttctgctccggccgcaagacgcgagctcacgtcctcacgcggctggcgacgagcctcgtcgacgcgctccgccaaacagagggcgggctcgtccctctcgacgtcccgatcgtcgttcacactcggcgggagaggtgcggcagcctctctacgtcgtccccgccagtagaggtaaaacggccgacgacagcccagctcgagcgccaagaggttggagcgaccgtcgtcgctttcaccgcgtcgggctgccggctcgccgtcgaagggacgactgagaacggccgactcgtgccggaggaggttggcgagcgactcgcaaaaggtttgctggccgagatcgcgcacggcggttgcgtcgactcggcgttgcaggtctgaccagcgttcagttctctcacgaaagccctcagcgctgatcaagcaccttttctgctctcaccaggcccatctgctcccttacctcctcctcgccggcaccccctcccctcctcaccagccgcaccgcacaaagcccttcacacccaggacgcacagccgctcgctcgcccgcttgccatcagtcatctcgctaggcacggccggcccgactgatgcgctcaagacggcgtgcaaggtcgggcgtaaattgaccggcgggagaatcgagcttgagcctcctgcgagagaagcggccgctgcggagggagcgacgcgaggagggcaaggttgggtgcttcgctgttggggtgtcggcgggcggctgtaggtgggcccatgcccgcgggtcgcaaaacagaacaaagatgaacggcatggagagaagagcgggtctgaaggaagacgacaagcagatggcgggacgggagagagggacaagcagatcgggcgcggagaggcgaagtacagcacaacaaagggaggcgagagaggtacaagtgaggggaagccagtcgtcgacacgcagcgtacgcgctctcctcacctttctccagccgacagaaccgcctcctcgagcagtcccgccaggcctgtcctccgtccgatccagacgccgccatcgacctcgacccctcgaatgacgacgccgccgccctggccgacaggcggcgtcagaccgtcaacgtgggccgagacgtcgcacgagccttggacacccgctagcgcaccgcccttgaggatgatctgcaggtcaagagaaaagcaagggggtgtcagggcttgatacccctttgacaacgagcgacagtcgatagtgcgcaccttgccgacaaagtcgcgcagctcggcgtcgctcacgatgtcgagcagctggtcctcgaacggcgccaggaccgagaggacgtttggctgctcgggatcctcgatcgtcgtcgtcgccgggagaggctcgcagttgaggtgggcaaaggctttgcgtgggggtggatcgatagctgcggaggtggc
